United States Patent Application Publication US 2019/0185849 A1 - sequence listing, part 2

SEQ ID NO: 7645 - DNA, 20 bp, Artificial Sequence
  Description of Artificial Sequence: Synthetic oligonucleotide
  Target: ANGPTL4; (-) strand; PAM type: NRG; PAM sequence: GGG
aggccaaactaggatgggac

SEQ ID NO: 7646 - DNA, 20 bp, Artificial Sequence
  Description of Artificial Sequence: Synthetic oligonucleotide
  Target: ANGPTL4; (-) strand; PAM type: NRG; PAM sequence: CGG
gaggccaaactaggatggga

SEQ ID NO: 7647 - DNA, 20 bp, Artificial Sequence
  Description of Artificial Sequence: Synthetic oligonucleotide
  Target: ANGPTL4; (-) strand; PAM type: NRG; PAM sequence: GGG
ccaggaggccaaactaggat

SEQ ID NO: 7648 - DNA, 20 bp, Artificial Sequence
  Description of Artificial Sequence: Synthetic oligonucleotide
  Target: ANGPTL4; (-) strand; PAM type: NRG; PAM sequence: TGG
tccaggaggccaaactagga

SEQ ID NO: 7649 - DNA, 20 bp, Artificial Sequence
  Description of Artificial Sequence: Synthetic oligonucleotide
  Target: ANGPTL4; (-) strand; PAM type: NRG; PAM sequence: AGG
gtggtccaggaggccaaact

SEQ ID NO: 7650 - DNA, 20 bp, Artificial Sequence
  Description of Artificial Sequence: Synthetic oligonucleotide
  Target: ANGPTL4; (-) strand; PAM type: NRG; PAM sequence: TAG
tgtggtccaggaggccaaac

SEQ ID NO: 7651 - DNA, 20 bp, Artificial Sequence
  Description of Artificial Sequence: Synthetic oligonucleotide
  Target: ANGPTL4; (-) strand; PAM type: NRG; PAM sequence: AGG
ctaggtgcttgtggtccagg

SEQ ID NO: 7652 - DNA, 20 bp, Artificial Sequence
  Description of Artificial Sequence: Synthetic oligonucleotide
  Target: ANGPTL4; (-) strand; PAM type: NRG; PAM sequence: GAG
tctaggtgcttgtggtccag

SEQ ID NO: 7653 - DNA, 20 bp, Artificial Sequence
  Description of Artificial Sequence: Synthetic oligonucleotide
  Target: ANGPTL4; (-) strand; PAM type: NRG; PAM sequence: AGG
ggtctaggtgcttgtggtcc

SEQ ID NO: 7654 - DNA, 20 bp, Artificial Sequence
  Description of Artificial Sequence: Synthetic oligonucleotide
  Target: ANGPTL4; (-) strand; PAM type: NRG; PAM sequence: CAG
tggtctaggtgcttgtggtc

SEQ ID NO: 7655 - DNA, 20 bp, Artificial Sequence
  Description of Artificial Sequence: Synthetic oligonucleotide
  Target: ANGPTL4; (-) strand; PAM type: NRG; PAM sequence: TGG
cctcatggtctaggtgcttg

SEQ ID NO: 7656 - DNA, 20 bp, Artificial Sequence
  Description of Artificial Sequence: Synthetic oligonucleotide
  Target: ANGPTL4; (-) strand; PAM type: NRG; PAM sequence: AGG
gcttggccacctcatggtct

SEQ ID NO: 7657 - DNA, 20 bp, Artificial Sequence
  Description of Artificial Sequence: Synthetic oligonucleotide
  Target: ANGPTL4; (-) strand; PAM type: NRG; PAM sequence: TAG
ggcttggccacctcatggtc

SEQ ID NO: 7658 - DNA, 20 bp, Artificial Sequence
  Description of Artificial Sequence: Synthetic oligonucleotide
  Target: ANGPTL4; (-) strand; PAM type: NRG; PAM sequence: TGG
gggcaggcttggccacctca

SEQ ID NO: 7659 - DNA, 20 bp, Artificial Sequence
  Description of Artificial Sequence: Synthetic oligonucleotide
  Target: ANGPTL4; (-) strand; PAM type: NRG; PAM sequence: TGG
cctctttcttcgggcaggct

SEQ ID NO: 7660 - DNA, 20 bp, Artificial Sequence
  Description of Artificial Sequence: Synthetic oligonucleotide
  Target: ANGPTL4; (-) strand; PAM type: NRG; PAM sequence: AGG
ggcagcctctttcttcgggc

SEQ ID NO: 7661 - DNA, 20 bp, Artificial Sequence
  Description of Artificial Sequence: Synthetic oligonucleotide
  Target: ANGPTL4; (-) strand; PAM type: NRG; PAM sequence: CAG
gggcagcctctttcttcggg

SEQ ID NO: 7662 - DNA, 20 bp, Artificial Sequence
  Description of Artificial Sequence: Synthetic oligonucleotide
  Target: ANGPTL4; (-) strand; PAM type: NRG; PAM sequence: GGG
ctcgggcagcctctttcttc

SEQ ID NO: 7663 - DNA, 20 bp, Artificial Sequence
  Description of Artificial Sequence: Synthetic oligonucleotide
  Target: ANGPTL4; (-) strand; PAM type: NRG; PAM sequence: CGG
tctcgggcagcctctttctt

SEQ ID NO: 7664 - DNA, 20 bp, Artificial Sequence
  Description of Artificial Sequence: Synthetic oligonucleotide
  Target: ANGPTL4; (-) strand; PAM type: NRG; PAM sequence: CAG
actggctgggccatctcggg

SEQ ID NO: 7665 - DNA, 20 bp, Artificial Sequence
  Description of Artificial Sequence: Synthetic oligonucleotide
  Target: ANGPTL4; (-) strand; PAM type: NRG; PAM sequence: GGG
tcaactggctgggccatctc

SEQ ID NO: 7666 - DNA, 20 bp, Artificial Sequence
  Description of Artificial Sequence: Synthetic oligonucleotide
  Target: ANGPTL4; (-) strand; PAM type: NRG; PAM sequence: CGG
gtcaactggctgggccatct

SEQ ID NO: 7667 - DNA, 20 bp, Artificial Sequence
  Description of Artificial Sequence: Synthetic oligonucleotide
  Target: ANGPTL4; (-) strand; PAM type: NRG; PAM sequence: GGG
gtgagccgggtcaactggct

SEQ ID NO: 7668 - DNA, 20 bp, Artificial Sequence
  Description of Artificial Sequence: Synthetic oligonucleotide
  Target: ANGPTL4; (-) strand; PAM type: NRG; PAM sequence: TGG
tgtgagccgggtcaactggc

SEQ ID NO: 7669 - DNA, 20 bp, Artificial Sequence
  Description of Artificial Sequence: Synthetic oligonucleotide
  Target: ANGPTL4; (-) strand; PAM type: NRG; PAM sequence: TGG
acattgtgagccgggtcaac

SEQ ID NO: 7670 - DNA, 20 bp, Artificial Sequence
  Description of Artificial Sequence: Synthetic oligonucleotide
  Target: ANGPTL4; (-) strand; PAM type: NRG; PAM sequence: GGG
ggcggctgacattgtgagcc

SEQ ID NO: 7671 - DNA, 20 bp, Artificial Sequence
  Description of Artificial Sequence: Synthetic oligonucleotide
  Target: ANGPTL4; (-) strand; PAM type: NRG; PAM sequence: CGG
aggcggctgacattgtgagc

SEQ ID NO: 7672 - DNA, 20 bp, Artificial Sequence
  Description of Artificial Sequence: Synthetic oligonucleotide
  Target: ANGPTL4; (-) strand; PAM type: NRG; PAM sequence: GAG
gtgcaggcggctgacattgt

SEQ ID NO: 7673 - DNA, 20 bp, Artificial Sequence
  Description of Artificial Sequence: Synthetic oligonucleotide
  Target: ANGPTL4; (-) strand; PAM type: NRG; PAM sequence: CGG
gcagacactcacggtgcagg

SEQ ID NO: 7674 - DNA, 20 bp, Artificial Sequence
  Description of Artificial Sequence: Synthetic oligonucleotide
  Target: ANGPTL4; (-) strand; PAM type: NRG; PAM sequence: AGG
ggggcagacactcacggtgc

SEQ ID NO: 7675 - DNA, 20 bp, Artificial Sequence
  Description of Artificial Sequence: Synthetic oligonucleotide
  Target: ANGPTL4; (-) strand; PAM type: NRG; PAM sequence: CAG
aggggcagacactcacggtg

SEQ ID NO: 7676 - DNA, 20 bp, Artificial Sequence
  Description of Artificial Sequence: Synthetic oligonucleotide
  Target: ANGPTL4; (-) strand; PAM type: NRG; PAM sequence: CGG
catcgaggggcagacactca

SEQ ID NO: 7677 - DNA, 20 bp, Artificial Sequence
  Description of Artificial Sequence: Synthetic oligonucleotide
  Target: ANGPTL4; (-) strand; PAM type: NRG; PAM sequence: CAG
caccggagagcatcgagggg

SEQ ID NO: 7678 - DNA, 20 bp, Artificial Sequence
  Description of Artificial Sequence: Synthetic oligonucleotide
  Target: ANGPTL4; (-) strand; PAM type: NRG; PAM sequence: GGG
ggccaccggagagcatcgag

SEQ ID NO: 7679 - DNA, 20 bp, Artificial Sequence
  Description of Artificial Sequence: Synthetic oligonucleotide
  Target: ANGPTL4; (-) strand; PAM type: NRG; PAM sequence: GGG
tggccaccggagagcatcga

SEQ ID NO: 7680 - DNA, 20 bp, Artificial Sequence
  Description of Artificial Sequence: Synthetic oligonucleotide
  Target: ANGPTL4; (-) strand; PAM type: NRG; PAM sequence: AGG
gtggccaccggagagcatcg

SEQ ID NO: 7681 - DNA, 20 bp, Artificial Sequence
  Description of Artificial Sequence: Synthetic oligonucleotide
  Target: ANGPTL4; (-) strand; PAM type: NRG; PAM sequence: GAG
ggtggccaccggagagcatc

SEQ ID NO: 7682 - DNA, 20 bp, Artificial Sequence
  Description of Artificial Sequence: Synthetic oligonucleotide
  Target: ANGPTL4; (-) strand; PAM type: NRG; PAM sequence: GAG
gggtaggggtggccaccgga

SEQ ID NO: 7683 - DNA, 20 bp, Artificial Sequence
  Description of Artificial Sequence: Synthetic oligonucleotide
  Target: ANGPTL4; (-) strand; PAM type: NRG; PAM sequence: GAG
cggggtaggggtggccaccg

SEQ ID NO: 7684 - DNA, 20 bp, Artificial Sequence
  Description of Artificial Sequence: Synthetic oligonucleotide
  Target: ANGPTL4; (-) strand; PAM type: NRG; PAM sequence: CGG
ggcggggtaggggtggccac

SEQ ID NO: 7685 - DNA, 20 bp, Artificial Sequence
  Description of Artificial Sequence: Synthetic oligonucleotide
  Target: ANGPTL4; (-) strand; PAM type: NRG; PAM sequence: TGG
ggcaagtggcggggtagggg

SEQ ID NO: 7686 - DNA, 20 bp, Artificial Sequence
  Description of Artificial Sequence: Synthetic oligonucleotide
  Target: ANGPTL4; (-) strand; PAM type: NRG; PAM sequence: GGG
aatggcaagtggcggggtag

SEQ ID NO: 7687 - DNA, 20 bp, Artificial Sequence
  Description of Artificial Sequence: Synthetic oligonucleotide
  Target: ANGPTL4; (-) strand; PAM type: NRG; PAM sequence: GGG
caatggcaagtggcggggta

SEQ ID NO: 7688 - DNA, 20 bp, Artificial Sequence
  Description of Artificial Sequence: Synthetic oligonucleotide
  Target: ANGPTL4; (-) strand; PAM type: NRG; PAM sequence: AGG
gcaatggcaagtggcggggt

SEQ ID NO: 7689 - DNA, 20 bp, Artificial Sequence
  Description of Artificial Sequence: Synthetic oligonucleotide
  Target: ANGPTL4; (-) strand; PAM type: NRG; PAM sequence: TAG
agcaatggcaagtggcgggg

SEQ ID NO: 7690 - DNA, 20 bp, Artificial Sequence
  Description of Artificial Sequence: Synthetic oligonucleotide
  Target: ANGPTL4; (-) strand; PAM type: NRG; PAM sequence: GGG
accagcaatggcaagtggcg

SEQ ID NO: 7691 - DNA, 20 bp, Artificial Sequence
  Description of Artificial Sequence: Synthetic oligonucleotide
  Target: ANGPTL4; (-) strand; PAM type: NRG; PAM sequence: GGG
gaccagcaatggcaagtggc

SEQ ID NO: 7692 - DNA, 20 bp, Artificial Sequence
  Description of Artificial Sequence: Synthetic oligonucleotide
  Target: ANGPTL4; (-) strand; PAM type: NRG; PAM sequence: CGG
ggaccagcaatggcaagtgg

SEQ ID NO: 7693 - DNA, 20 bp, Artificial Sequence
  Description of Artificial Sequence: Synthetic oligonucleotide
  Target: ANGPTL4; (-) strand; PAM type: NRG; PAM sequence: TGG
agaggaccagcaatggcaag

SEQ ID NO: 7694 - DNA, 20 bp, Artificial Sequence
  Description of Artificial Sequence: Synthetic oligonucleotide
  Target: ANGPTL4; (-) strand; PAM type: NRG; PAM sequence: AAG
aggagaggaccagcaatggc

SEQ ID NO: 7695 - DNA, 20 bp, Artificial Sequence
  Description of Artificial Sequence: Synthetic oligonucleotide
  Target: ANGPTL4; (-) strand; PAM type: NRG; PAM sequence: TGG
gacaaggagaggaccagcaa

SEQ ID NO: 7696 - DNA, 20 bp, Artificial Sequence
  Description of Artificial Sequence: Synthetic oligonucleotide
  Target: ANGPTL4; (-) strand; PAM type: NRG; PAM sequence: CAG
ggacctgacaaggagaggac

SEQ ID NO: 7697 - DNA, 20 bp, Artificial Sequence
  Description of Artificial Sequence: Synthetic oligonucleotide
  Target: ANGPTL4; (-) strand; PAM type: NRG; PAM sequence: AGG
aaggtggacctgacaaggag

SEQ ID NO: 7698 - DNA, 20 bp, Artificial Sequence
  Description of Artificial Sequence: Synthetic oligonucleotide
  Target: ANGPTL4; (-) strand; PAM type: NRG; PAM sequence: GAG
taaggtggacctgacaagga

SEQ ID NO: 7699 - DNA, 20 bp, Artificial Sequence
  Description of Artificial Sequence: Synthetic oligonucleotide
  Target: ANGPTL4; (-) strand; PAM type: NRG; PAM sequence: GAG
cttaaggtggacctgacaag

SEQ ID NO: 7700 - DNA, 20 bp, Artificial Sequence
  Description of Artificial Sequence: Synthetic oligonucleotide
  Target: ANGPTL4; (-) strand; PAM type: NRG; PAM sequence: AGG
tccttaaggtggacctgaca

SEQ ID NO: 7701 - DNA, 20 bp, Artificial Sequence
  Description of Artificial Sequence: Synthetic oligonucleotide
  Target: ANGPTL4; (-) strand; PAM type: NRG; PAM sequence: AAG
ctccttaaggtggacctgac

SEQ ID NO: 7702 - DNA, 20 bp, Artificial Sequence
  Description of Artificial Sequence: Synthetic oligonucleotide
  Target: ANGPTL4; (-) strand; PAM type: NRG; PAM sequence: TGG
aggacatcttctccttaagg

SEQ ID NO: 7703 - DNA, 20 bp, Artificial Sequence
  Description of Artificial Sequence: Synthetic oligonucleotide
  Target: ANGPTL4; (-) strand; PAM type: NRG; PAM sequence: AGG
gccaggacatcttctcctta

SEQ ID NO: 7704 - DNA, 20 bp, Artificial Sequence
  Description of Artificial Sequence: Synthetic oligonucleotide
  Target: ANGPTL4; (-) strand; PAM type: NRG; PAM sequence: AAG
ggccaggacatcttctcctt

SEQ ID NO: 7705 - DNA, 20 bp, Artificial Sequence
  Description of Artificial Sequence: Synthetic oligonucleotide
  Target: ANGPTL4; (-) strand; PAM type: NRG; PAM sequence: AGG
gccctcagggactccaggcc

SEQ ID NO: 7706 - DNA, 20 bp, Artificial Sequence
  Description of Artificial Sequence: Synthetic oligonucleotide
  Target: ANGPTL4; (-) strand; PAM type: NRG; PAM sequence: CAG
agccctcagggactccaggc

SEQ ID NO: 7707 - DNA, 20 bp, Artificial Sequence
  Description of Artificial Sequence: Synthetic oligonucleotide
  Target: ANGPTL4; (-) strand; PAM type: NRG; PAM sequence: AGG
ggtgagccctcagggactcc

SEQ ID NO: 7708 - DNA, 20 bp, Artificial Sequence
  Description of Artificial Sequence: Synthetic oligonucleotide
  Target: ANGPTL4; (-) strand; PAM type: NRG; PAM sequence: CAG
tggtgagccctcagggactc

SEQ ID NO: 7709 - DNA, 20 bp, Artificial Sequence
  Description of Artificial Sequence: Synthetic oligonucleotide
  Target: ANGPTL4; (-) strand; PAM type: NRG; PAM sequence: GGG
cagagactggtgagccctca

SEQ ID NO: 7710 - DNA, 20 bp, Artificial Sequence
  Description of Artificial Sequence: Synthetic oligonucleotide
  Target: ANGPTL4; (-) strand; PAM type: NRG; PAM sequence: AGG
ccagagactggtgagccctc

SEQ ID NO: 7711 - DNA, 20 bp, Artificial Sequence
  Description of Artificial Sequence: Synthetic oligonucleotide
  Target: ANGPTL4; (-) strand; PAM type: NRG; PAM sequence: CAG
cccagagactggtgagccct

SEQ ID NO: 7712 - DNA, 20 bp, Artificial Sequence
  Description of Artificial Sequence: Synthetic oligonucleotide
  Target: ANGPTL4; (-) strand; PAM type: NRG; PAM sequence: GAG
gctttgacccagagactggt

SEQ ID NO: 7713 - DNA, 20 bp, Artificial Sequence
  Description of Artificial Sequence: Synthetic oligonucleotide
  Target: ANGPTL4; (-) strand; PAM type: NRG; PAM sequence: TGG
atcagctttgacccagagac

SEQ ID NO: 7714 - DNA, 20 bp, Artificial Sequence
  Description of Artificial Sequence: Synthetic oligonucleotide
  Target: ANGPTL4; (-) strand; PAM type: NRG; PAM sequence: GAG
ctcccatcagctttgaccca

SEQ ID NO: 7715 - DNA, 20 bp, Artificial Sequence
  Description of Artificial Sequence: Synthetic oligonucleotide
  Target: ANGPTL4; (-) strand; PAM type: NRG; PAM sequence: CAG
tgctcccatcagctttgacc

SEQ ID NO: 7716 - DNA, 20 bp, Artificial Sequence
  Description of Artificial Sequence: Synthetic oligonucleotide
  Target: ANGPTL4; (-) strand; PAM type: NRG; PAM sequence: CAG
gaggaaggaggtgctcccat

SEQ ID NO: 7717 - DNA, 20 bp, Artificial Sequence
  Description of Artificial Sequence: Synthetic oligonucleotide
  Target: ANGPTL4; (-) strand; PAM type: NRG; PAM sequence: AGG
caggtcagggctgaggaagg

SEQ ID NO: 7718 - DNA, 20 bp, Artificial Sequence
  Description of Artificial Sequence: Synthetic oligonucleotide
  Target: ANGPTL4; (-) strand; PAM type: NRG; PAM sequence: GAG
ccaggtcagggctgaggaag

SEQ ID NO: 7719 - DNA, 20 bp, Artificial Sequence
  Description of Artificial Sequence: Synthetic oligonucleotide
  Target: ANGPTL4; (-) strand; PAM type: NRG; PAM sequence: AGG
ggccaggtcagggctgagga

SEQ ID NO: 7720 - DNA, 20 bp, Artificial Sequence
  Description of Artificial Sequence: Synthetic oligonucleotide
  Target: ANGPTL4; (-) strand; PAM type: NRG; PAM sequence: AAG
gggccaggtcagggctgagg

SEQ ID NO: 7721 - DNA, 20 bp, Artificial Sequence
  Description of Artificial Sequence: Synthetic oligonucleotide
  Target: ANGPTL4; (-) strand; PAM type: NRG; PAM sequence: AGG
gctgggccaggtcagggctg

SEQ ID NO: 7722 - DNA, 20 bp, Artificial Sequence
  Description of Artificial Sequence: Synthetic oligonucleotide
  Target: ANGPTL4; (-) strand; PAM type: NRG; PAM sequence: GAG
ggctgggccaggtcagggct

SEQ ID NO: 7723 - DNA, 20 bp, Artificial Sequence
  Description of Artificial Sequence: Synthetic oligonucleotide
  Target: ANGPTL4; (-) strand; PAM type: NRG; PAM sequence: GGG
ggcctggctgggccaggtca

SEQ ID NO: 7724 - DNA, 20 bp, Artificial Sequence
  Description of Artificial Sequence: Synthetic oligonucleotide
  Target: ANGPTL4; (-) strand; PAM type: NRG; PAM sequence: AGG
tggcctggctgggccaggtc

SEQ ID NO: 7725 - DNA, 20 bp, Artificial Sequence
  Description of Artificial Sequence: Synthetic oligonucleotide
  Target: ANGPTL4; (-) strand; PAM type: NRG; PAM sequence: CAG
gtggcctggctgggccaggt

SEQ ID NO: 7726 - DNA, 20 bp, Artificial Sequence
  Description of Artificial Sequence: Synthetic oligonucleotide
  Target: ANGPTL4; (-) strand; PAM type: NRG; PAM sequence: AGG
ttgggtggcctggctgggcc

SEQ ID NO: 7727 - DNA, 20 bp, Artificial Sequence
  Description of Artificial Sequence: Synthetic oligonucleotide
  Target: ANGPTL4; (-) strand; PAM type: NRG; PAM sequence: CAG
gttgggtggcctggctgggc

SEQ ID NO: 7728 - DNA, 20 bp, Artificial Sequence
  Description of Artificial Sequence: Synthetic oligonucleotide
  Target: ANGPTL4; (-) strand; PAM type: NRG; PAM sequence: GGG
aagggttgggtggcctggct

SEQ ID NO: 7729 - DNA, 20 bp, Artificial Sequence
  Description of Artificial Sequence: Synthetic oligonucleotide
  Target: ANGPTL4; (-) strand; PAM type: NRG; PAM sequence: TGG
gaagggttgggtggcctggc

SEQ ID NO: 7730 - DNA, 20 bp, Artificial Sequence
  Description of Artificial Sequence: Synthetic oligonucleotide
  Target: ANGPTL4; (-) strand; PAM type: NRG; PAM sequence: TGG
aggagaagggttgggtggcc

SEQ ID NO: 7731 - DNA, 20 bp, Artificial Sequence
  Description of Artificial Sequence: Synthetic oligonucleotide
  Target: ANGPTL4; (-) strand; PAM type: NRG; PAM sequence: TGG
tgcagaggagaagggttggg

SEQ ID NO: 7732 - DNA, 20 bp, Artificial Sequence
  Description of Artificial Sequence: Synthetic oligonucleotide
  Target: ANGPTL4; (-) strand; PAM type: NRG; PAM sequence: GGG
gcttgcagaggagaagggtt

SEQ ID NO: 7733 - DNA, 20 bp, Artificial Sequence
  Description of Artificial Sequence: Synthetic oligonucleotide
  Target: ANGPTL4; (-) strand; PAM type: NRG; PAM sequence: TGG
ggcttgcagaggagaagggt

SEQ ID NO: 7734 - DNA, 20 bp, Artificial Sequence
  Description of Artificial Sequence: Synthetic oligonucleotide
  Target: ANGPTL4; (-) strand; PAM type: NRG; PAM sequence: GGG
cactggcttgcagaggagaa

SEQ ID NO: 7735 - DNA, 20 bp, Artificial Sequence
  Description of Artificial Sequence: Synthetic oligonucleotide
  Target: ANGPTL4; (-) strand; PAM type: NRG; PAM sequence: AGG
ccactggcttgcagaggaga

SEQ ID NO: 7736 - DNA, 20 bp, Artificial Sequence
  Description of Artificial Sequence: Synthetic oligonucleotide
  Target: ANGPTL4; (-) strand; PAM type: NRG; PAM sequence: AAG
cccactggcttgcagaggag

SEQ ID NO: 7737 - DNA, 20 bp, Artificial Sequence
  Description of Artificial Sequence: Synthetic oligonucleotide
  Target: ANGPTL4; (-) strand; PAM type: NRG; PAM sequence: GAG
cagcccactggcttgcagag

SEQ ID NO: 7738 - DNA, 20 bp, Artificial Sequence
  Description of Artificial Sequence: Synthetic oligonucleotide
  Target: ANGPTL4; (-) strand; PAM type: NRG; PAM sequence: AGG
gacagcccactggcttgcag

SEQ ID NO: 7739 - DNA, 20 bp, Artificial Sequence
  Description of Artificial Sequence: Synthetic oligonucleotide
  Target: ANGPTL4; (-) strand; PAM type: NRG; PAM sequence: GAG
ggacagcccactggcttgca

SEQ ID NO: 7740 - DNA, 20 bp, Artificial Sequence
  Description of Artificial Sequence: Synthetic oligonucleotide
  Target: ANGPTL4; (-) strand; PAM type: NRG; PAM sequence: CAG
agggacagcccactggcttg

SEQ ID NO: 7741 - DNA, 20 bp, Artificial Sequence
  Description of Artificial Sequence: Synthetic oligonucleotide
  Target: ANGPTL4; (-) strand; PAM type: NRG; PAM sequence: TGG
gggcttcagggacagcccac

SEQ ID NO: 7742 - DNA, 20 bp, Artificial Sequence
  Description of Artificial Sequence: Synthetic oligonucleotide
  Target: ANGPTL4; (-) strand; PAM type: NRG; PAM sequence: CAG
gatcagcagggcttcaggga

SEQ ID NO: 7743 - DNA, 20 bp, Artificial Sequence
  Description of Artificial Sequence: Synthetic oligonucleotide
  Target: ANGPTL4; (-) strand; PAM type: NRG; PAM sequence: GGG
cagtgatcagcagggcttca

SEQ ID NO: 7744 - DNA, 20 bp, Artificial Sequence
  Description of Artificial Sequence: Synthetic oligonucleotide
  Target: ANGPTL4; (-) strand; PAM type: NRG; PAM sequence: AGG
tcagtgatcagcagggcttc

SEQ ID NO: 7745 - DNA, 20 bp, Artificial Sequence
  Description of Artificial Sequence: Synthetic oligonucleotide
  Target: ANGPTL4; (-) strand; PAM type: NRG; PAM sequence: CAG
atcagtgatcagcagggctt

SEQ ID NO: 7746 - DNA, 20 bp, Artificial Sequence
  Description of Artificial Sequence: Synthetic oligonucleotide
  Target: ANGPTL4; (-) strand; PAM type: NRG; PAM sequence: GGG
gttccaatcagtgatcagca

SEQ ID NO: 7747 - DNA, 20 bp, Artificial Sequence
  Description of Artificial Sequence: Synthetic oligonucleotide
  Target: ANGPTL4; (-) strand; PAM type: NRG; PAM sequence: AGG
tgttccaatcagtgatcagc

SEQ ID NO: 7748 - DNA, 20 bp, Artificial Sequence
  Description of Artificial Sequence: Synthetic oligonucleotide
  Target: ANGPTL4; (-) strand; PAM type: NRG; PAM sequence: CAG
ctgttccaatcagtgatcag

SEQ ID NO: 7749 - DNA, 20 bp, Artificial Sequence
  Description of Artificial Sequence: Synthetic oligonucleotide
  Target: ANGPTL4; (-) strand; PAM type: NRG; PAM sequence: CAG
cctctgttccaatcagtgat

SEQ ID NO: 7750 - DNA, 20 bp, Artificial Sequence
  Description of Artificial Sequence: Synthetic oligonucleotide
  Target: ANGPTL4; (-) strand; PAM type: NRG; PAM sequence: CAG
ttctccacctctgttccaat

SEQ ID NO: 7751 - DNA, 20 bp, Artificial Sequence
  Description of Artificial Sequence: Synthetic oligonucleotide
  Target: ANGPTL4; (-) strand; PAM type: NRG; PAM sequence: AAG
ccctgcagctcaagtccctc

SEQ ID NO: 7752 - DNA, 20 bp, Artificial Sequence
  Description of Artificial Sequence: Synthetic oligonucleotide
  Target: ANGPTL4; (-) strand; PAM type: NRG; PAM sequence: AAG
ctccagcacccctgcagctc

SEQ ID NO: 7753 - DNA, 20 bp, Artificial Sequence
  Description of Artificial Sequence: Synthetic oligonucleotide
  Target: ANGPTL4; (-) strand; PAM type: NRG; PAM sequence: CAG
taccttctccagcacccctg

SEQ ID NO: 7754 - DNA, 20 bp, Artificial Sequence
  Description of Artificial Sequence: Synthetic oligonucleotide
  Target: ANGPTL4; (-) strand; PAM type: NRG; PAM sequence: CAG
aaccccatttctaccttctc

SEQ ID NO: 7755 - DNA, 20 bp, Artificial Sequence
  Description of Artificial Sequence: Synthetic oligonucleotide
  Target: ANGPTL4; (-) strand; PAM type: NRG; PAM sequence: TGG
gaaggttctaaccttcagga

SEQ ID NO: 7756 - DNA, 20 bp, Artificial Sequence
  Description of Artificial Sequence: Synthetic oligonucleotide
  Target: ANGPTL4; (-) strand; PAM type: NRG; PAM sequence: AGG
cctagaaggttctaaccttc

SEQ ID NO: 7757 - DNA, 20 bp, Artificial Sequence
  Description of Artificial Sequence: Synthetic oligonucleotide
  Target: ANGPTL4; (-) strand; PAM type: NRG; PAM sequence: CAG
ccctagaaggttctaacctt

SEQ ID NO: 7758 - DNA, 20 bp, Artificial Sequence
  Description of Artificial Sequence: Synthetic oligonucleotide
  Target: ANGPTL4; (-) strand; PAM type: NRG; PAM sequence: AGG
ccatgacaccctcccctaga

SEQ ID NO: 7759 - DNA, 20 bp, Artificial Sequence
  Description of Artificial Sequence: Synthetic oligonucleotide
  Target: ANGPTL4; (-) strand; PAM type: NRG; PAM sequence: AAG
tccatgacaccctcccctag

SEQ ID NO: 7760 - DNA, 20 bp, Artificial Sequence
  Description of Artificial Sequence: Synthetic oligonucleotide
  Target: ANGPTL4; (-) strand; PAM type: NRG; PAM sequence: TAG
tcctccatgacaccctcccc

SEQ ID NO: 7761 - DNA, 20 bp, Artificial Sequence
  Description of Artificial Sequence: Synthetic oligonucleotide
  Target: ANGPTL4; (-) strand; PAM type: NRG; PAM sequence: TGG
aatctacaaacactactacc

SEQ ID NO: 7762 - DNA, 20 bp, Artificial Sequence
  Description of Artificial Sequence: Synthetic oligonucleotide
  Target: ANGPTL4; (-) strand; PAM type: NRG; PAM sequence: GGG
ataccccaagacattgtgga

SEQ ID NO: 7763 - DNA, 20 bp, Artificial Sequence
  Description of Artificial Sequence: Synthetic oligonucleotide
  Target: ANGPTL4; (-) strand; PAM type: NRG; PAM sequence: AGG
cataccccaagacattgtgg

SEQ ID NO: 7764 - DNA, 20 bp, Artificial Sequence
  Description of Artificial Sequence: Synthetic oligonucleotide
  Target: ANGPTL4; (-) strand; PAM type: NRG; PAM sequence: GAG
acataccccaagacattgtg

SEQ ID NO: 7765 - DNA, 20 bp, Artificial Sequence
  Description of Artificial Sequence: Synthetic oligonucleotide
  Target: ANGPTL4; (-) strand; PAM type: NRG; PAM sequence: TGG
ccacataccccaagacattg

SEQ ID NO: 7766 - DNA, 20 bp, Artificial Sequence
  Description of Artificial Sequence: Synthetic oligonucleotide
  Target: ANGPTL4; (-) strand; PAM type: NRG; PAM sequence: AAG
ccctaattcccacatacccc

SEQ ID NO: 7767 - DNA, 20 bp, Artificial Sequence
  Description of Artificial Sequence: Synthetic oligonucleotide
  Target: ANGPTL4; (-) strand; PAM type: NRG; PAM sequence: CAG
gtctgggagctgggggttcc

SEQ ID NO: 7768 - DNA, 20 bp, Artificial Sequence
  Description of Artificial Sequence: Synthetic oligonucleotide
  Target: ANGPTL4; (-) strand; PAM type: NRG; PAM sequence: GGG
gtttctggtctgggagctgg

SEQ ID NO: 7769 - DNA, 20 bp, Artificial Sequence
  Description of Artificial Sequence: Synthetic oligonucleotide
  Target: ANGPTL4; (-) strand; PAM type: NRG; PAM sequence: GGG
tgtttctggtctgggagctg

SEQ ID NO: 7770 - DNA, 20 bp, Artificial Sequence
  Description of Artificial Sequence: Synthetic oligonucleotide
  Target: ANGPTL4; (-) strand; PAM type: NRG; PAM sequence: GGG
gtgtttctggtctgggagct

SEQ ID NO: 7771 - DNA, 20 bp, Artificial Sequence
  Description of Artificial Sequence: Synthetic oligonucleotide
  Target: ANGPTL4; (-) strand; PAM type: NRG; PAM sequence: TGG
agtgtttctggtctgggagc

SEQ ID NO: 7772 - DNA, 20 bp, Artificial Sequence
  Description of Artificial Sequence: Synthetic oligonucleotide
  Target: ANGPTL4; (-) strand; PAM type: NRG; PAM sequence: GAG
caagagtgtttctggtctgg

SEQ ID NO: 7773 - DNA, 20 bp, Artificial Sequence
  Description of Artificial Sequence: Synthetic oligonucleotide
  Target: ANGPTL4; (-) strand; PAM type: NRG; PAM sequence: GGG
tacaagagtgtttctggtct

SEQ ID NO: 7774 - DNA, 20 bp, Artificial Sequence
  Description of Artificial Sequence: Synthetic oligonucleotide
  Target: ANGPTL4; (-) strand; PAM type: NRG; PAM sequence: TGG
atacaagagtgtttctggtc

SEQ ID NO: 7775 - DNA, 20 bp, Artificial Sequence
  Description of Artificial Sequence: Synthetic oligonucleotide
  Target: ANGPTL4; (-) strand; PAM type: NRG; PAM sequence: TGG
gtaagatacaagagtgtttc

SEQ ID NO: 7776 - DNA, 20 bp, Artificial Sequence
  Description of Artificial Sequence: Synthetic oligonucleotide
  Target: ANGPTL4; (-) strand; PAM type: NRG; PAM sequence: GAG
attggatttgtaagatacaa

SEQ ID NO: 7777 - DNA, 20 bp, Artificial Sequence
  Description of Artificial Sequence: Synthetic oligonucleotide
  Target: ANGPTL4; (-) strand; PAM type: NRG; PAM sequence: AAG
gcattggatttgtaagatac

SEQ ID NO: 7778 - DNA, 20 bp, Artificial Sequence
  Description of Artificial Sequence: Synthetic oligonucleotide
  Target: ANGPTL4; (-) strand; PAM type: NRG; PAM sequence: AAG
acctggagcattggatttgt

SEQ ID NO: 7779 - DNA, 20 bp, Artificial Sequence
  Description of Artificial Sequence: Synthetic oligonucleotide
  Target: ANGPTL4; (-) strand; PAM type: NRG; PAM sequence: TGG
gggtcagggacctggagcat

SEQ ID NO: 7780 - DNA, 20 bp, Artificial Sequence
  Description of Artificial Sequence: Synthetic oligonucleotide
  Target: ANGPTL4; (-) strand; PAM type: NRG; PAM sequence: GAG
gaagaggggtcagggacctg

SEQ ID NO: 7781 - DNA, 20 bp, Artificial Sequence
  Description of Artificial Sequence: Synthetic oligonucleotide
  Target: ANGPTL4; (-) strand; PAM type: NRG; PAM sequence: TGG
aggaagaggggtcagggacc

SEQ ID NO: 7782 - DNA, 20 bp, Artificial Sequence
  Description of Artificial Sequence: Synthetic oligonucleotide
  Target: ANGPTL4; (-) strand; PAM type: NRG; PAM sequence: GGG
ggaaggaggaagaggggtca

SEQ ID NO: 7783 - DNA, 20 bp, Artificial Sequence
  Description of Artificial Sequence: Synthetic oligonucleotide
  Target: ANGPTL4; (-) strand; PAM type: NRG; PAM sequence: AGG
aggaaggaggaagaggggtc

SEQ ID NO: 7784 - DNA, 20 bp, Artificial Sequence
  Description of Artificial Sequence: Synthetic oligonucleotide
  Target: ANGPTL4; (-) strand; PAM type: NRG; PAM sequence: CAG
gaggaaggaggaagaggggt

SEQ ID NO: 7785 - DNA, 20 bp, Artificial Sequence
  Description of Artificial Sequence: Synthetic oligonucleotide
  Target: ANGPTL4; (-) strand; PAM type: NRG; PAM sequence: GGG
aagagaggaaggaggaagag

SEQ ID NO: 7786 - DNA, 20 bp, Artificial Sequence
  Description of Artificial Sequence: Synthetic oligonucleotide
  Target: ANGPTL4; (-) strand; PAM type: NRG; PAM sequence: GGG
caagagaggaaggaggaaga

SEQ ID NO: 7787 - DNA, 20 bp, Artificial Sequence
  Description of Artificial Sequence: Synthetic oligonucleotide
  Target: ANGPTL4; (-) strand; PAM type: NRG; PAM sequence: AGG
acaagagaggaaggaggaag

SEQ ID NO: 7788 - DNA, 20 bp, Artificial Sequence
  Description of Artificial Sequence: Synthetic oligonucleotide
  Target: ANGPTL4; (-) strand; PAM type: NRG; PAM sequence: GAG
aacaagagaggaaggaggaa

SEQ ID NO: 7789 - DNA, 20 bp, Artificial Sequence
  Description of Artificial Sequence: Synthetic oligonucleotide
  Target: ANGPTL4; (-) strand; PAM type: NRG; PAM sequence: AAG
agaacaagagaggaaggagg

SEQ ID NO: 7790 - DNA, 20 bp, Artificial Sequence
  Description of Artificial Sequence: Synthetic oligonucleotide
  Target: ANGPTL4; (-) strand; PAM type: NRG; PAM sequence: AGG
aggagaacaagagaggaagg

SEQ ID NO: 7791 - DNA, 20 bp, Artificial Sequence
  Description of Artificial Sequence: Synthetic oligonucleotide
  Target: ANGPTL4; (-) strand; PAM type: NRG; PAM sequence: GAG
gaggagaacaagagaggaag

SEQ ID NO: 7792 - DNA, 20 bp, Artificial Sequence
  Description of Artificial Sequence: Synthetic oligonucleotide
  Target: ANGPTL4; (-) strand; PAM type: NRG; PAM sequence: AGG
aggaggagaacaagagagga

SEQ ID NO: 7793 - DNA, 20 bp, Artificial Sequence
  Description of Artificial Sequence: Synthetic oligonucleotide
  Target: ANGPTL4; (-) strand; PAM type: NRG; PAM sequence: AAG
gaggaggagaacaagagagg

SEQ ID NO: 7794 - DNA, 20 bp, Artificial Sequence
  Description of Artificial Sequence: Synthetic oligonucleotide
  Target: ANGPTL4; (-) strand; PAM type: NRG; PAM sequence: AGG
agggaggaggagaacaagag

SEQ ID NO: 7795 - DNA, 20 bp, Artificial Sequence
  Description of Artificial Sequence: Synthetic oligonucleotide
  Target: ANGPTL4; (-) strand; PAM type: NRG; PAM sequence: GAG
gagggaggaggagaacaaga

SEQ ID NO: 7796 - DNA, 20 bp, Artificial Sequence
  Description of Artificial Sequence: Synthetic oligonucleotide
  Target: ANGPTL4; (-) strand; PAM type: NRG; PAM sequence: GAG
gggagggaggaggagaacaa

SEQ ID NO: 7797 - DNA, 20 bp, Artificial Sequence
  Description of Artificial Sequence: Synthetic oligonucleotide
  Target: ANGPTL4; (-) strand; PAM type: NRG; PAM sequence: AAG
cggggagggaggaggagaac

SEQ ID NO: 7798 - DNA, 20 bp, Artificial Sequence
  Description of Artificial Sequence: Synthetic oligonucleotide
  Target: ANGPTL4; (-) strand; PAM type: NRG; PAM sequence: GAG
cgggggcggggagggaggag

SEQ ID NO: 7799 - DNA, 20 bp, Artificial Sequence
  Description of Artificial Sequence: Synthetic oligonucleotide
  Target: ANGPTL4; (-) strand; PAM type: NRG; PAM sequence: AGG
ggcgggggcggggagggagg

SEQ ID NO: 7800 - DNA, 20 bp, Artificial Sequence
  Description of Artificial Sequence: Synthetic oligonucleotide
  Target: ANGPTL4; (-) strand; PAM type: NRG; PAM sequence: GAG
cggcgggggcggggagggag

SEQ ID NO: 7801 - DNA, 20 bp, Artificial Sequence
  Description of Artificial Sequence: Synthetic oligonucleotide
  Target: ANGPTL4; (-) strand; PAM type: NRG; PAM sequence: AGG
gccggcgggggcggggaggg

SEQ ID NO: 7802 - DNA, 20 bp, Artificial Sequence
  Description of Artificial Sequence: Synthetic oligonucleotide
  Target: ANGPTL4; (-) strand; PAM type: NRG; PAM sequence: GAG
ggccggcgggggcggggagg

SEQ ID NO: 7803 - DNA, 20 bp, Artificial Sequence
  Description of Artificial Sequence: Synthetic oligonucleotide
  Target: ANGPTL4; (-) strand; PAM type: NRG; PAM sequence: GGG
ggggccggcgggggcgggga

SEQ ID NO: 7804 - DNA, 20 bp, Artificial Sequence
  Description of Artificial Sequence: Synthetic oligonucleotide
  Target: ANGPTL4; (-) strand; PAM type: NRG; PAM sequence: AGG
gggggccggcgggggcgggg

SEQ ID NO: 7805 - DNA, 20 bp, Artificial Sequence
  Description of Artificial Sequence: Synthetic oligonucleotide
  Target: ANGPTL4; (-) strand; PAM type: NRG; PAM sequence: GAG
agggggccggcgggggcggg

SEQ ID NO: 7806 - DNA, 20 bp, Artificial Sequence
  Description of Artificial Sequence: Synthetic oligonucleotide
  Target: ANGPTL4; (-) strand; PAM type: NRG; PAM sequence: GGG
ggagggggccggcgggggcg

SEQ ID NO: 7807 - DNA, 20 bp, Artificial Sequence
  Description of Artificial Sequence: Synthetic oligonucleotide
  Target: ANGPTL4; (-) strand; PAM type: NRG; PAM sequence: GGG
gggagggggccggcgggggc

SEQ ID NO: 7808 - DNA, 20 bp, Artificial Sequence
  Description of Artificial Sequence: Synthetic oligonucleotide
  Target: ANGPTL4; (-) strand; PAM type: NRG; PAM sequence: CGG
ggggagggggccggcggggg

SEQ ID NO: 7809 - DNA, 20 bp, Artificial Sequence
  Description of Artificial Sequence: Synthetic oligonucleotide
  Target: ANGPTL4; (-) strand; PAM type: NRG; PAM sequence: GGG
ggtggggagggggccggcgg

SEQ ID NO: 7810 - DNA, 20 bp, Artificial Sequence
  Description of Artificial Sequence: Synthetic oligonucleotide
  Target: ANGPTL4; (-) strand; PAM type: NRG; PAM sequence: GGG
cggtggggagggggccggcg

SEQ ID NO: 7811 - DNA, 20 bp, Artificial Sequence
  Description of Artificial Sequence: Synthetic oligonucleotide
  Target: ANGPTL4; (-) strand; PAM type: NRG; PAM sequence: GGG
gcggtggggagggggccggc

SEQ ID NO: 7812 - DNA, 20 bp, Artificial Sequence
  Description of Artificial Sequence: Synthetic oligonucleotide
  Target: ANGPTL4; (-) strand; PAM type: NRG; PAM sequence: CGG
tgcggtggggagggggccgg

SEQ ID NO: 7813 - DNA, 20 bp, Artificial Sequence
  Description of Artificial Sequence: Synthetic oligonucleotide
  Target: ANGPTL4; (-) strand; PAM type: NRG; PAM sequence: CGG
ttctgcggtggggagggggc

SEQ ID NO: 7814 - DNA, 20 bp, Artificial Sequence
  Description of Artificial Sequence: Synthetic oligonucleotide
  Target: ANGPTL4; (-) strand; PAM type: NRG; PAM sequence: GGG
cactttctgcggtggggagg

SEQ ID NO: 7815 - DNA, 20 bp, Artificial Sequence
  Description of Artificial Sequence: Synthetic oligonucleotide
  Target: ANGPTL4; (-) strand; PAM type: NRG; PAM sequence: GGG
ccactttctgcggtggggag

SEQ ID NO: 7816 - DNA, 20 bp, Artificial Sequence
  Description of Artificial Sequence: Synthetic oligonucleotide
  Target: ANGPTL4; (-) strand; PAM type: NRG; PAM sequence: GGG
cccactttctgcggtgggga

SEQ ID NO: 7817 - DNA, 20 bp, Artificial Sequence
  Description of Artificial Sequence: Synthetic oligonucleotide
  Target: ANGPTL4; (-) strand; PAM type: NRG; PAM sequence: AGG
gcccactttctgcggtgggg

SEQ ID NO: 7818 - DNA, 20 bp, Artificial Sequence
  Description of Artificial Sequence: Synthetic oligonucleotide
  Target: ANGPTL4; (-) strand; PAM type: NRG; PAM sequence: GAG
agcccactttctgcggtggg

SEQ ID NO: 7819 - DNA, 20 bp, Artificial Sequence
  Description of Artificial Sequence: Synthetic oligonucleotide
  Target: ANGPTL4; (-) strand; PAM type: NRG; PAM sequence: GGG
aaagcccactttctgcggtg

SEQ ID NO: 7820 - DNA, 20 bp, Artificial Sequence
  Description of Artificial Sequence: Synthetic oligonucleotide
  Target: ANGPTL4; (-) strand; PAM type: NRG; PAM sequence: GGG
aaaagcccactttctgcggt

SEQ ID NO: 7821 - DNA, 20 bp, Artificial Sequence
  Description of Artificial Sequence: Synthetic oligonucleotide
  Target: ANGPTL4; (-) strand; PAM type: NRG; PAM sequence: TGG
caaaagcccactttctgcgg

SEQ ID NO: 7822 - DNA, 20 bp, Artificial Sequence
  Description of Artificial Sequence: Synthetic oligonucleotide
  Target: ANGPTL4; (-) strand; PAM type: NRG; PAM sequence: CGG
cagcaaaagcccactttctg

SEQ ID NO: 7823 - DNA, 20 bp, Artificial Sequence
  Description of Artificial Sequence: Synthetic oligonucleotide
  Target: ANGPTL4; (-) strand; PAM type: NRG; PAM sequence: AAG
acaacttgtggtggcagcaa

SEQ ID NO: 7824 - DNA, 20 bp, Artificial Sequence
  Description of Artificial Sequence: Synthetic oligonucleotide
  Target: ANGPTL4; (-) strand; PAM type: NRG; PAM sequence: CAG
gcacctacaacttgtggtgg

SEQ ID NO: 7825 - DNA, 20 bp, Artificial Sequence
  Description of Artificial Sequence: Synthetic oligonucleotide
  Target: ANGPTL4; (-) strand; PAM type: NRG; PAM sequence: TGG
aaagcacctacaacttgtgg

SEQ ID NO: 7826 - DNA, 20 bp, Artificial Sequence
  Description of Artificial Sequence: Synthetic oligonucleotide
  Target: ANGPTL4; (-) strand; PAM type: NRG; PAM sequence: TGG
aataaagcacctacaacttg

SEQ ID NO: 7827 - DNA, 20 bp, Artificial Sequence
  Description of Artificial Sequence: Synthetic oligonucleotide
  Target: ANGPTL4; (-) strand; PAM type: NRG; PAM sequence: AAG
tgaacggagatttgggaata

SEQ ID NO: 7828 - DNA, 20 bp, Artificial Sequence
  Description of Artificial Sequence: Synthetic oligonucleotide
  Target: ANGPTL4; (-) strand; PAM type: NRG; PAM sequence: GGG
ttcgagatgaacggagattt

SEQ ID NO: 7829 - DNA, 20 bp, Artificial Sequence
  Description of Artificial Sequence: Synthetic oligonucleotide
  Target: ANGPTL4; (-) strand; PAM type: NRG; PAM sequence: TGG
gttcgagatgaacggagatt

SEQ ID NO: 7830 - DNA, 20 bp, Artificial Sequence
  Description of Artificial Sequence: Synthetic oligonucleotide
  Target: ANGPTL4; (-) strand; PAM type: NRG; PAM sequence: GAG
gctgtggttcgagatgaacg

SEQ ID NO: 7831 - DNA, 20 bp, Artificial Sequence
  Description of Artificial Sequence: Synthetic oligonucleotide
  Target: ANGPTL4; (-) strand; PAM type: NRG; PAM sequence: CGG
atgctgtggttcgagatgaa

SEQ ID NO: 7832 - DNA, 20 bp, Artificial Sequence
  Description of Artificial Sequence: Synthetic oligonucleotide
  Target: ANGPTL4; (-) strand; PAM type: NRG; PAM sequence: GAG
acgtggacatgctgtggttc

SEQ ID NO: 7833 - DNA, 20 bp, Artificial Sequence
  Description of Artificial Sequence: Synthetic oligonucleotide
  Target: ANGPTL4; (-) strand; PAM type: NRG; PAM sequence: TGG
ggacacacgtggacatgctg

SEQ ID NO: 7834 - DNA, 20 bp, Artificial Sequence
  Description of Artificial Sequence: Synthetic oligonucleotide
  Target: ANGPTL4; (-) strand; PAM type: NRG; PAM sequence: TGG
gagtctgcatcggacacacg

SEQ ID NO: 7835 - DNA, 20 bp, Artificial Sequence
  Description of Artificial Sequence: Synthetic oligonucleotide
  Target: ANGPTL4; (-) strand; PAM type: NRG; PAM sequence: CGG
agagaaccgcgagtctgcat

SEQ ID NO: 7836 - DNA, 20 bp, Artificial Sequence
  Description of Artificial Sequence: Synthetic oligonucleotide
  Target: ANGPTL4; (-) strand; PAM type: NRG; PAM sequence: GAG
ccgtgaacttagagaaccgc

SEQ ID NO: 7837 - DNA, 20 bp, Artificial Sequence
  Description of Artificial Sequence: Synthetic oligonucleotide
  Target: ANGPTL4; (-) strand; PAM type: NRG; PAM sequence: GAG
cgtgtggggccgtgaactta

SEQ ID NO: 7838 - DNA, 20 bp, Artificial Sequence
  Description of Artificial Sequence: Synthetic oligonucleotide
  Target: ANGPTL4; (-) strand; PAM type: NRG; PAM sequence: TAG
accgtgtggggccgtgaact

SEQ ID NO: 7839 - DNA, 20 bp, Artificial Sequence
  Description of Artificial Sequence: Synthetic oligonucleotide
  Target: ANGPTL4; (-) strand; PAM type: NRG; PAM sequence: GGG
gaccacagagaaaccgtgtg

SEQ ID NO: 7840 - DNA, 20 bp, Artificial Sequence
  Description of Artificial Sequence: Synthetic oligonucleotide
  Target: ANGPTL4; (-) strand; PAM type: NRG; PAM sequence: GGG
ggaccacagagaaaccgtgt

SEQ ID NO: 7841 - DNA, 20 bp, Artificial Sequence
  Description of Artificial Sequence: Synthetic oligonucleotide
  Target: ANGPTL4; (-) strand; PAM type: NRG; PAM sequence: TGG
aggaccacagagaaaccgtg

SEQ ID NO: 7842 - DNA, 20 bp, Artificial Sequence
  Description of Artificial Sequence: Synthetic oligonucleotide
  Target: ANGPTL4; (-) strand; PAM type: NRG; PAM sequence: GAG
agggaaggatgaggaccaca

SEQ ID NO: 7843 - DNA, 20 bp, Artificial Sequence
  Description of Artificial Sequence: Synthetic oligonucleotide
  Target: ANGPTL4; (-) strand; PAM type: NRG; PAM sequence: CAG
gcagggaaggatgaggacca

SEQ ID NO: 7844 - DNA, 20 bp, Artificial Sequence
  Description of Artificial Sequence: Synthetic oligonucleotide
  Target: ANGPTL4; (-) strand; PAM type: NRG; PAM sequence: AGG
cacagatgcagggaaggatg

SEQ ID NO: 7845 - DNA, 20 bp, Artificial Sequence
  Description of Artificial Sequence: Synthetic oligonucleotide
  Target: ANGPTL4; (-) strand; PAM type: NRG; PAM sequence: GAG
ccacagatgcagggaaggat

SEQ ID NO: 7846 - DNA, 20 bp, Artificial Sequence
  Description of Artificial Sequence: Synthetic oligonucleotide
  Target: ANGPTL4; (-) strand; PAM type: NRG; PAM sequence: AGG
gacagccacagatgcaggga

SEQ ID NO: 7847 - DNA, 20 bp, Artificial Sequence
  Description of Artificial Sequence: Synthetic oligonucleotide
  Target: ANGPTL4; (-) strand; PAM type: NRG; PAM sequence: AAG
ggacagccacagatgcaggg

SEQ ID NO: 7848 - DNA, 20 bp, Artificial Sequence
  Description of Artificial Sequence: Synthetic oligonucleotide
  Target: ANGPTL4; (-) strand; PAM type: NRG; PAM sequence: GGG
tgtggacagccacagatgca

SEQ ID NO: 7849 - DNA, 20 bp, Artificial Sequence
  Description of Artificial Sequence: Synthetic oligonucleotide
  Target: ANGPTL4; (-) strand; PAM type: NRG; PAM sequence: AGG
ctgtggacagccacagatgc

SEQ ID NO: 7850 - DNA, 20 bp, Artificial Sequence
  Description of Artificial Sequence: Synthetic oligonucleotide
  Target: ANGPTL4; (-) strand; PAM type: NRG; PAM sequence: CAG
gctgtggacagccacagatg

SEQ ID NO: 7851 - DNA, 20 bp, Artificial Sequence
  Description of Artificial Sequence: Synthetic oligonucleotide
  Target: ANGPTL4; (-) strand; PAM type: NRG; PAM sequence: CAG
cagttggctgtggacagcca

SEQ ID NO: 7852 - DNA, 20 bp, Artificial Sequence
  Description of Artificial Sequence: Synthetic oligonucleotide
  Target: ANGPTL4; (-) strand; PAM type: NRG; PAM sequence: CAG
ttcacccagttggctgtgga

SEQ ID NO: 7853 - DNA, 20 bp, Artificial Sequence
  Description of Artificial Sequence: Synthetic oligonucleotide
  Target: ANGPTL4; (-) strand; PAM type: NRG; PAM sequence: TGG
aactttcacccagttggctg

SEQ ID NO: 7854 - DNA, 20 bp, Artificial Sequence
  Description of Artificial Sequence: Synthetic oligonucleotide
  Target: ANGPTL4; (-) strand; PAM type: NRG; PAM sequence: TGG
gatccaaactttcacccagt

SEQ ID NO: 7855 - DNA, 20 bp, Artificial Sequence
  Description of Artificial Sequence: Synthetic oligonucleotide
  Target: ANGPTL4; (-) strand; PAM type: NRG; PAM sequence: CAG
gggggatccaaactttcacc

SEQ ID NO: 7856 - DNA, 20 bp, Artificial Sequence
  Description of Artificial Sequence: Synthetic oligonucleotide
  Target: ANGPTL4; (-) strand; PAM type: NRG; PAM sequence: GGG
tgaccctagggtgtgagagg

SEQ ID NO: 7857 - DNA, 20 bp, Artificial Sequence
  Description of Artificial Sequence: Synthetic oligonucleotide
  Target: ANGPTL4; (-) strand; PAM type: NRG; PAM sequence: GGG
ctgaccctagggtgtgagag

SEQ ID NO: 7858 - DNA, 20 bp, Artificial Sequence
  Description of Artificial Sequence: Synthetic oligonucleotide
  Target: ANGPTL4; (-) strand; PAM type: NRG; PAM sequence: GGG
actgaccctagggtgtgaga

SEQ ID NO: 7859 - DNA, 20 bp, Artificial Sequence
  Description of Artificial Sequence: Synthetic oligonucleotide
  Target: ANGPTL4; (-) strand; PAM type: NRG; PAM sequence: AGG
cactgaccctagggtgtgag

SEQ ID NO: 7860 - DNA, 20 bp, Artificial Sequence
  Description of Artificial Sequence: Synthetic oligonucleotide
  Target: ANGPTL4; (-) strand; PAM type: NRG; PAM sequence: GAG
ccactgaccctagggtgtga

SEQ ID NO: 7861 - DNA, 20 bp, Artificial Sequence
  Description of Artificial Sequence: Synthetic oligonucleotide
  Target: ANGPTL4; (-) strand; PAM type: NRG; PAM sequence: GAG
tgccactgaccctagggtgt

SEQ ID NO: 7862 - DNA, 20 bp, Artificial Sequence
  Description of Artificial Sequence: Synthetic oligonucleotide
  Target: ANGPTL4; (-) strand; PAM type: NRG; PAM sequence: GGG
gaagcctgccactgacccta

SEQ ID NO: 7863 - DNA, 20 bp, Artificial Sequence
  Description of Artificial Sequence: Synthetic oligonucleotide
  Target: ANGPTL4; (-) strand; PAM type: NRG; PAM sequence: AGG
ggaagcctgccactgaccct

SEQ ID NO: 7864 - DNA, 20 bp, Artificial Sequence
  Description of Artificial Sequence: Synthetic oligonucleotide
  Target: ANGPTL4; (-) strand; PAM type: NRG; PAM sequence: TAG
tggaagcctgccactgaccc

SEQ ID NO: 7865 - DNA, 20 bp, Artificial Sequence
  Description of Artificial Sequence: Synthetic oligonucleotide
  Target: ANGPTL4; (-) strand; PAM type: NRG; PAM sequence: AAG
cctcaggtctacagtgctgg

SEQ ID NO: 7866 - DNA, 20 bp, Artificial Sequence
  Description of Artificial Sequence: Synthetic oligonucleotide
  Target: ANGPTL4; (-) strand; PAM type: NRG; PAM sequence: TGG
aaccctcaggtctacagtgc

SEQ ID NO: 7867 - DNA, 20 bp, Artificial Sequence
  Description of Artificial Sequence: Synthetic oligonucleotide
  Target: ANGPTL4; (-) strand; PAM type: NRG; PAM sequence: CAG
ggagagaaccctcaggtcta

SEQ ID NO: 7868 - DNA, 20 bp, Artificial Sequence
  Description of Artificial Sequence: Synthetic oligonucleotide
  Target: ANGPTL4; (-) strand; PAM type: NRG; PAM sequence: AGG
ttggggaggagagaaccctc

SEQ ID NO: 7869 - DNA, 20 bp, Artificial Sequence
  Description of Artificial Sequence: Synthetic oligonucleotide
  Target: ANGPTL4; (-) strand; PAM type: NRG; PAM sequence: CAG
cttggggaggagagaaccct

SEQ ID NO: 7870 - DNA, 20 bp, Artificial Sequence
  Description of Artificial Sequence: Synthetic oligonucleotide
  Target: ANGPTL4; (-) strand; PAM type: NRG; PAM sequence: GAG
gagcgggagcttggggagga

SEQ ID NO: 7871 - DNA, 20 bp, Artificial Sequence
  Description of Artificial Sequence: Synthetic oligonucleotide
  Target: ANGPTL4; (-) strand; PAM type: NRG; PAM sequence: GAG
aggagcgggagcttggggag

SEQ ID NO: 7872 - DNA, 20 bp, Artificial Sequence
  Description of Artificial Sequence: Synthetic oligonucleotide
  Target: ANGPTL4; (-) strand; PAM type: NRG; PAM sequence: AGG
gaaggagcgggagcttgggg

SEQ ID NO: 7873 - DNA, 20 bp, Artificial Sequence
  Description of Artificial Sequence: Synthetic oligonucleotide
  Target: ANGPTL4; (-) strand; PAM type: NRG; PAM sequence: GAG
ggaaggagcgggagcttggg

SEQ ID NO: 7874 - DNA, 20 bp, Artificial Sequence
  Description of Artificial Sequence: Synthetic oligonucleotide
  Target: ANGPTL4; (-) strand; PAM type: NRG; PAM sequence: GGG
tgggaaggagcgggagcttg

SEQ ID NO: 7875 - DNA, 20 bp, Artificial Sequence
  Description of Artificial Sequence: Synthetic oligonucleotide
  Target: ANGPTL4; (-) strand; PAM type: NRG; PAM sequence: GGG
gtgggaaggagcgggagctt

SEQ ID NO: 7876 - DNA, 20 bp, Artificial Sequence
  Description of Artificial Sequence: Synthetic oligonucleotide
  Target: ANGPTL4; (-) strand; PAM type: NRG; PAM sequence: TGG
ggtgggaaggagcgggagct

SEQ ID NO: 7877 - DNA, 20 bp, Artificial Sequence
  Description of Artificial Sequence: Synthetic oligonucleotide
  Target: ANGPTL4; (-) strand; PAM type: NRG; PAM sequence: GAG
acggaggtgggaaggagcgg

SEQ ID NO: 7878 - DNA, 20 bp, Artificial Sequence
  Description of Artificial Sequence: Synthetic oligonucleotide
  Target: ANGPTL4; (-) strand; PAM type: NRG; PAM sequence: GGG
gcacggaggtgggaaggagc

SEQ ID NO: 7879 - DNA, 20 bp, Artificial Sequence
  Description of Artificial Sequence: Synthetic oligonucleotide
  Target: ANGPTL4; (-) strand; PAM type: NRG; PAM sequence: CGG
agcacggaggtgggaaggag

SEQ ID NO: 7880 - DNA, 20 bp, Artificial Sequence
  Description of Artificial Sequence: Synthetic oligonucleotide
  Target: ANGPTL4; (-) strand; PAM type: NRG; PAM sequence: GAG
ggcagcacggaggtgggaag

SEQ ID NO: 7881 - DNA, 20 bp, Artificial Sequence
  Description of Artificial Sequence: Synthetic oligonucleotide
  Target: ANGPTL4; (-) strand; PAM type: NRG; PAM sequence: AGG
cgggcagcacggaggtggga

SEQ ID NO: 7882 - DNA, 20 bp, Artificial Sequence
  Description of Artificial Sequence: Synthetic oligonucleotide
  Target: ANGPTL4; (-) strand; PAM type: NRG; PAM sequence: AAG
gcgggcagcacggaggtggg

SEQ ID NO: 7883 - DNA, 20 bp, Artificial Sequence
  Description of Artificial Sequence: Synthetic oligonucleotide
  Target: ANGPTL4; (-) strand; PAM type: NRG; PAM sequence: GGG
ggggcgggcagcacggaggt

SEQ ID NO: 7884 - DNA, 20 bp, Artificial Sequence
  Description of Artificial Sequence: Synthetic oligonucleotide
  Target: ANGPTL4; (-) strand; PAM type: NRG; PAM sequence: TGG
gggggcgggcagcacggagg

SEQ ID NO: 7885 - DNA, 20 bp, Artificial Sequence
  Description of Artificial Sequence: Synthetic oligonucleotide
  Target: ANGPTL4; (-) strand; PAM type: NRG; PAM sequence: AGG
gttgggggcgggcagcacgg

SEQ ID NO: 7886 - DNA, 20 bp, Artificial Sequence
  Description of Artificial Sequence: Synthetic oligonucleotide
  Target: ANGPTL4; (-) strand; PAM type: NRG; PAM sequence: GAG
ggttgggggcgggcagcacg

SEQ ID NO: 7887 - DNA, 20 bp, Artificial Sequence
  Description of Artificial Sequence: Synthetic oligonucleotide
  Target: ANGPTL4; (-) strand; PAM type: NRG; PAM sequence: CGG
ggggttgggggcgggcagca

SEQ ID NO: 7888 - DNA, 20 bp, Artificial Sequence
  Description of Artificial Sequence: Synthetic oligonucleotide
  Target: ANGPTL4; (-) strand; PAM type: NRG; PAM sequence: CAG
ctggcggggttgggggcggg

SEQ ID NO: 7889 - DNA, 20 bp, Artificial Sequence
  Description of Artificial Sequence: Synthetic oligonucleotide
  Target: ANGPTL4; (-) strand; PAM type: NRG; PAM sequence: GGG
agcctggcggggttgggggc

SEQ ID NO: 7890 - DNA, 20 bp, Artificial Sequence
  Description of Artificial Sequence: Synthetic oligonucleotide
  Target: ANGPTL4; (-) strand; PAM type: NRG; PAM sequence: CGG
tagcctggcggggttggggg

SEQ ID NO: 7891 - DNA, 20 bp, Artificial Sequence
  Description of Artificial Sequence: Synthetic oligonucleotide
  Target: ANGPTL4; (-) strand; PAM type: NRG; PAM sequence: GGG
tgctagcctggcggggttgg

SEQ ID NO: 7892 - DNA, 20 bp, Artificial Sequence
  Description of Artificial Sequence: Synthetic oligonucleotide
  Target: ANGPTL4; (-) strand; PAM type: NRG; PAM sequence: GGG
atgctagcctggcggggttg

SEQ ID NO: 7893 - DNA, 20 bp, Artificial Sequence
  Description of Artificial Sequence: Synthetic oligonucleotide
  Target: ANGPTL4; (-) strand; PAM type: NRG; PAM sequence: GGG
gatgctagcctggcggggtt

SEQ ID NO: 7894 - DNA, 20 bp, Artificial Sequence
  Description of Artificial Sequence: Synthetic oligonucleotide
  Target: ANGPTL4; (-) strand; PAM type: NRG; PAM sequence: TGG
agatgctagcctggcggggt

SEQ ID NO: 7895 - DNA, 20 bp, Artificial Sequence
  Description of Artificial Sequence: Synthetic oligonucleotide
  Target: ANGPTL4; (-) strand; PAM type: NRG; PAM sequence: GGG
gctgagatgctagcctggcg

SEQ ID NO: 7896 - DNA, 20 bp, Artificial Sequence
  Description of Artificial Sequence: Synthetic oligonucleotide
  Target: ANGPTL4; (-) strand; PAM type: NRG; PAM sequence: GGG
cgctgagatgctagcctggc

SEQ ID NO: 7897 - DNA, 20 bp, Artificial Sequence
  Description of Artificial Sequence: Synthetic oligonucleotide
  Target: ANGPTL4; (-) strand; PAM type: NRG; PAM sequence: CGG
acgctgagatgctagcctgg

SEQ ID NO: 7898 - DNA, 20 bp, Artificial Sequence
  Description of Artificial Sequence: Synthetic oligonucleotide
  Target: ANGPTL4; (-) strand; PAM type: NRG; PAM sequence: TGG
accacgctgagatgctagcc

SEQ ID NO: 7899 - DNA, 20 bp, Artificial Sequence
  Description of Artificial Sequence: Synthetic oligonucleotide
  Target: ANGPTL4; (-) strand; PAM type: NRG; PAM sequence: TAG
ccctgaccacgctgagatgc

SEQ ID NO: 7900 - DNA, 20 bp, Artificial Sequence
  Description of Artificial Sequence: Synthetic oligonucleotide
  Target: ANGPTL4; (-) strand; PAM type: NRG; PAM sequence: GAG
gacaggaccctgaccacgct

SEQ ID NO: 7901 - DNA, 20 bp, Artificial Sequence
  Description of Artificial Sequence: Synthetic oligonucleotide
  Target: ANGPTL4; (-) strand; PAM type: NRG; PAM sequence: AGG
gtggctttgggagggtggac

SEQ ID NO: 7902 - DNA, 20 bp, Artificial Sequence
  Description of Artificial Sequence: Synthetic oligonucleotide
  Target: ANGPTL4; (-) strand; PAM type: NRG; PAM sequence: CAG
ggtggctttgggagggtgga

SEQ ID NO: 7903 - DNA, 20 bp, Artificial Sequence
  Description of Artificial Sequence: Synthetic oligonucleotide
  Target: ANGPTL4; (-) strand; PAM type: NRG; PAM sequence: TGG
ggatggtggctttgggaggg

SEQ ID NO: 7904 - DNA, 20 bp, Artificial Sequence
  Description of Artificial Sequence: Synthetic oligonucleotide
  Target: ANGPTL4; (-) strand; PAM type: NRG; PAM sequence: GGG
ctgggatggtggctttggga

SEQ ID NO: 7905 - DNA, 20 bp, Artificial Sequence
  Description of Artificial Sequence: Synthetic oligonucleotide
  Target: ANGPTL4; (-) strand; PAM type: NRG; PAM sequence: AGG
cctgggatggtggctttggg

SEQ ID NO: 7906 - DNA, 20 bp, Artificial Sequence
  Description of Artificial Sequence: Synthetic oligonucleotide
  Target: ANGPTL4; (-) strand; PAM type: NRG; PAM sequence: GAG
tcctgggatggtggctttgg

SEQ ID NO: 7907 - DNA, 20 bp, Artificial Sequence
  Description of Artificial Sequence: Synthetic oligonucleotide
  Target: ANGPTL4; (-) strand; PAM type: NRG; PAM sequence: GGG
catcctgggatggtggcttt

SEQ ID NO: 7908 - DNA, 20 bp, Artificial Sequence
  Description of Artificial Sequence: Synthetic oligonucleotide
  Target: ANGPTL4; (-) strand; PAM type: NRG; PAM sequence: TGG
tcatcctgggatggtggctt

SEQ ID NO: 7909 - DNA, 20 bp, Artificial Sequence
  Description of Artificial Sequence: Synthetic oligonucleotide
  Target: ANGPTL4; (-) strand; PAM type: NRG; PAM sequence: TGG
agcccctcatcctgggatgg

SEQ ID NO: 7910 - DNA, 20 bp, Artificial Sequence
  Description of Artificial Sequence: Synthetic oligonucleotide
  Target: ANGPTL4; (-) strand; PAM type: NRG; PAM sequence: TGG
agaagcccctcatcctggga

SEQ ID NO: 7911 - DNA, 20 bp, Artificial Sequence
  Description of Artificial Sequence: Synthetic oligonucleotide
  Target: ANGPTL4; (-) strand; PAM type: NRG; PAM sequence: GGG
ctccagaagcccctcatcct

SEQ ID NO: 7912 - DNA, 20 bp, Artificial Sequence
  Description of Artificial Sequence: Synthetic oligonucleotide
  Target: ANGPTL4; (-) strand; PAM type: NRG; PAM sequence: TGG
cctccagaagcccctcatcc

SEQ ID NO: 7913 - DNA, 20 bp, Artificial Sequence
  Description of Artificial Sequence: Synthetic oligonucleotide
  Target: ANGPTL4; (-) strand; PAM type: NRG; PAM sequence: AAG
cttcccccgtcaccctccag

SEQ ID NO: 7914 - DNA, 20 bp, Artificial Sequence
  Description of Artificial Sequence: Synthetic oligonucleotide
  Target: ANGPTL4; (-) strand; PAM type: NRG; PAM sequence: CAG
tgccttcccccgtcaccctc

SEQ ID NO: 7915 - DNA, 20 bp, Artificial Sequence
  Description of Artificial Sequence: Synthetic oligonucleotide
  Target: ANGPTL4; (-) strand; PAM type: NRG; PAM sequence: AGG
ttccaccgcatttcccagcc

SEQ ID NO: 7916 - DNA, 20 bp, Artificial Sequence
  Description of Artificial Sequence: Synthetic oligonucleotide
  Target: ANGPTL4; (-) strand; PAM type: NRG; PAM sequence: CAG
cttccaccgcatttcccagc

SEQ ID NO: 7917 - DNA, 20 bp, Artificial Sequence
  Description of Artificial Sequence: Synthetic oligonucleotide
  Target: ANGPTL4; (-) strand; PAM type: NRG; PAM sequence: CAG
cccccttccaccgcatttcc

SEQ ID NO: 7918 - DNA, 20 bp, Artificial Sequence
  Description of Artificial Sequence: Synthetic oligonucleotide
  Target: ANGPTL4; (-) strand; PAM type: NRG; PAM sequence: CAG
gtctgggagtcccgaaccca

SEQ ID NO: 7919 - DNA, 20 bp, Artificial Sequence
  Description of Artificial Sequence: Synthetic oligonucleotide
  Target: ANGPTL4; (-) strand; PAM type: NRG; PAM sequence: GAG
ggcctgagccaagagtctgg

SEQ ID NO: 7920 - DNA, 20 bp, Artificial Sequence
  Description of Artificial Sequence: Synthetic oligonucleotide
  Target: ANGPTL4; (-) strand; PAM type: NRG; PAM sequence: GGG
cgggcctgagccaagagtct

SEQ ID NO: 7921 - DNA, 20 bp, Artificial Sequence
  Description of Artificial Sequence: Synthetic oligonucleotide
  Target: ANGPTL4; (-) strand; PAM type: NRG; PAM sequence: TGG
gcgggcctgagccaagagtc

SEQ ID NO: 7922 - DNA, 20 bp, Artificial Sequence
  Description of Artificial Sequence: Synthetic oligonucleotide
  Target: ANGPTL4; (-) strand; PAM type: NRG; PAM sequence: GAG
acttggcgggcctgagccaa

SEQ ID NO: 7923 - DNA, 20 bp, Artificial Sequence
  Description of Artificial Sequence: Synthetic oligonucleotide
  Target: ANGPTL4; (-) strand; PAM type: NRG; PAM sequence: AAG
ctacttggcgggcctgagcc

SEQ ID NO: 7924 - DNA, 20 bp, Artificial Sequence
  Description of Artificial Sequence: Synthetic oligonucleotide
  Target: ANGPTL4; (-) strand; PAM type: NRG; PAM sequence: GAG
ttctcctacttggcgggcct

SEQ ID NO: 7925 - DNA, 20 bp, Artificial Sequence
  Description of Artificial Sequence: Synthetic oligonucleotide
  Target: ANGPTL4; (-) strand; PAM type: NRG; PAM sequence: GGG
tgaactttctcctacttggc

SEQ ID NO: 7926 - DNA, 20 bp, Artificial Sequence
  Description of Artificial Sequence: Synthetic oligonucleotide
  Target: ANGPTL4; (-) strand; PAM type: NRG; PAM sequence: CGG
ctgaactttctcctacttgg

SEQ ID NO: 7927 - DNA, 20 bp, Artificial Sequence
  Description of Artificial Sequence: Synthetic oligonucleotide
  Target: ANGPTL4; (-) strand; PAM type: NRG; PAM sequence: TGG
gctctgaactttctcctact

SEQ ID NO: 7928 - DNA, 20 bp, Artificial Sequence
  Description of Artificial Sequence: Synthetic oligonucleotide
  Target: ANGPTL4; (-) strand; PAM type: NRG; PAM sequence: CAG
atgccagctgttcgccttcc

SEQ ID NO: 7929 - DNA, 20 bp, Artificial Sequence
  Description of Artificial Sequence: Synthetic oligonucleotide
  Target: ANGPTL4; (-) strand; PAM type: NRG; PAM sequence: CAG
agtgtggcttccatgaatgc

SEQ ID NO: 7930 - DNA, 20 bp, Artificial Sequence
  Description of Artificial Sequence: Synthetic oligonucleotide
  Target: ANGPTL4; (-) strand; PAM type: NRG; PAM sequence: TGG
acgcggccaaaccaccagtg

SEQ ID NO: 7931 - DNA, 20 bp, Artificial Sequence
  Description of Artificial Sequence: Synthetic oligonucleotide
  Target: ANGPTL4; (-) strand; PAM type: NRG; PAM sequence: CAG
tgggcacgcggccaaaccac

SEQ ID NO: 7932 - DNA, 20 bp, Artificial Sequence
  Description of Artificial Sequence: Synthetic oligonucleotide
  Target: ANGPTL4; (-) strand; PAM type: NRG; PAM sequence: CGG
atccagtaaggatgggcacg

SEQ ID NO: 7933 - DNA, 20 bp, Artificial Sequence
  Description of Artificial Sequence: Synthetic oligonucleotide
  Target: ANGPTL4; (-) strand; PAM type: NRG; PAM sequence: GGG
tcctcccatccagtaaggat

SEQ ID NO: 7934 - DNA, 20 bp, Artificial Sequence
  Description of Artificial Sequence: Synthetic oligonucleotide
  Target: ANGPTL4; (-) strand; PAM type: NRG; PAM sequence: TGG
ttcctcccatccagtaagga

SEQ ID NO: 7935 - DNA, 20 bp, Artificial Sequence
  Description of Artificial Sequence: Synthetic oligonucleotide
  Target: ANGPTL4; (-) strand; PAM type: NRG; PAM sequence: AGG
tactttcctcccatccagta

SEQ ID NO: 7936 - DNA, 20 bp, Artificial Sequence
  Description of Artificial Sequence: Synthetic oligonucleotide
  Target: ANGPTL4; (-) strand; PAM type: NRG; PAM sequence: AAG
ctactttcctcccatccagt

SEQ ID NO: 7937 - DNA, 20 bp, Artificial Sequence
  Description of Artificial Sequence: Synthetic oligonucleotide
  Target: ANGPTL4; (-) strand; PAM type: NRG; PAM sequence: CAG
tcccctactttcctcccatc

SEQ ID NO: 7938 - DNA, 20 bp, Artificial Sequence
  Description of Artificial Sequence: Synthetic oligonucleotide
  Target: ANGPTL4; (-) strand; PAM type: NRG; PAM sequence: AGG
aagacgctttccggcccctc

SEQ ID NO: 7939 - DNA, 20 bp, Artificial Sequence
  Description of Artificial Sequence: Synthetic oligonucleotide
  Target: ANGPTL4; (-) strand; PAM type: NRG; PAM sequence: CAG
gaagacgctttccggcccct

SEQ ID NO: 7940 - DNA, 20 bp, Artificial Sequence
  Description of Artificial Sequence: Synthetic oligonucleotide
  Target: ANGPTL4; (-) strand; PAM type: NRG; PAM sequence: CGG
gtgaccaggaagacgctttc

SEQ ID NO: 7941 - DNA, 20 bp, Artificial Sequence
  Description of Artificial Sequence: Synthetic oligonucleotide
  Target: ANGPTL4; (-) strand; PAM type: NRG; PAM sequence: AAG
gcgggcccagagtgaccagg

SEQ ID NO: 7942 - DNA, 20 bp, Artificial Sequence
  Description of Artificial Sequence: Synthetic oligonucleotide
  Target: ANGPTL4; (-) strand; PAM type: NRG; PAM sequence: AGG
ggggcgggcccagagtgacc

SEQ ID NO: 7943 - DNA, 20 bp, Artificial Sequence
  Description of Artificial Sequence: Synthetic oligonucleotide
  Target: ANGPTL4; (-) strand; PAM type: NRG; PAM sequence: CAG
gggggcgggcccagagtgac

SEQ ID NO: 7944 - DNA, 20 bp, Artificial Sequence
  Description of Artificial Sequence: Synthetic oligonucleotide
  Target: ANGPTL4; (-) strand; PAM type: NRG; PAM sequence: GAG
tgggggtgggggcgggccca

SEQ ID NO: 7945 - DNA, 20 bp, Artificial Sequence
  Description of Artificial Sequence: Synthetic oligonucleotide
  Target: ANGPTL4; (-) strand; PAM type: NRG; PAM sequence: CAG
ggtgggggtgggggcgggcc

SEQ ID NO: 7946 - DNA, 20 bp, Artificial Sequence
  Description of Artificial Sequence: Synthetic oligonucleotide
  Target: ANGPTL4; (-) strand; PAM type: NRG; PAM sequence: GGG
tgcacggtgggggtgggggc

SEQ ID NO: 7947 - DNA, 20 bp, Artificial Sequence
  Description of Artificial Sequence: Synthetic oligonucleotide
  Target: ANGPTL4; (-) strand; PAM type: NRG; PAM sequence: CGG
ctgcacggtgggggtggggg

SEQ ID NO: 7948 - DNA, 20 bp, Artificial Sequence
  Description of Artificial Sequence: Synthetic oligonucleotide
  Target: ANGPTL4; (-) strand; PAM type: NRG; PAM sequence: GGG
agtctgcacggtgggggtgg

SEQ ID NO: 7949 - DNA, 20 bp, Artificial Sequence
  Description of Artificial Sequence: Synthetic oligonucleotide
  Target: ANGPTL4; (-) strand; PAM type: NRG; PAM sequence: GGG
gagtctgcacggtgggggtg

SEQ ID NO: 7950 - DNA, 20 bp, Artificial Sequence
  Description of Artificial Sequence: Synthetic oligonucleotide
  Target: ANGPTL4; (-) strand; PAM type: NRG; PAM sequence: GGG
tgagtctgcacggtgggggt

SEQ ID NO: 7951 - DNA, 20 bp, Artificial Sequence
  Description of Artificial Sequence: Synthetic oligonucleotide
  Target: ANGPTL4; (-) strand; PAM type: NRG; PAM sequence: TGG
atgagtctgcacggtggggg

SEQ ID NO: 7952 - DNA, 20 bp, Artificial Sequence
  Description of Artificial Sequence: Synthetic oligonucleotide
  Target: ANGPTL4; (-) strand; PAM type: NRG; PAM sequence: GGG
gaaatgagtctgcacggtgg

SEQ ID NO: 7953 - DNA, 20 bp, Artificial Sequence
  Description of Artificial Sequence: Synthetic oligonucleotide
  Target: ANGPTL4; (-) strand; PAM type: NRG; PAM sequence: GGG
cgaaatgagtctgcacggtg

SEQ ID NO: 7954 - DNA, 20 bp, Artificial Sequence
  Description of Artificial Sequence: Synthetic oligonucleotide
  Target: ANGPTL4; (-) strand; PAM type: NRG; PAM sequence: GGG
tcgaaatgagtctgcacggt

SEQ ID NO: 7955 - DNA, 20 bp, Artificial Sequence
  Description of Artificial Sequence: Synthetic oligonucleotide
  Target: ANGPTL4; (-) strand; PAM type: NRG; PAM sequence: TGG
gtcgaaatgagtctgcacgg

SEQ ID NO: 7956 - DNA, 20 bp, Artificial Sequence
  Description of Artificial Sequence: Synthetic oligonucleotide
  Target: ANGPTL4; (-) strand; PAM type: NRG; PAM sequence: CGG
aaggtcgaaatgagtctgca

SEQ ID NO: 7957 - DNA, 20 bp, Artificial Sequence
  Description of Artificial Sequence: Synthetic oligonucleotide
  Target: ANGPTL4; (-) strand; PAM type: NRG; PAM sequence: GAG
agtaggggaaaggtcgaaat

SEQ ID NO: 7958 - DNA, 20 bp, Artificial Sequence
  Description of Artificial Sequence: Synthetic oligonucleotide
  Target: ANGPTL4; (-) strand; PAM type: NRG; PAM sequence: AGG
cagccggaaaagtaggggaa

SEQ ID NO: 7959 - DNA, 20 bp, Artificial Sequence
  Description of Artificial Sequence: Synthetic oligonucleotide
  Target: ANGPTL4; (-) strand; PAM type: NRG; PAM sequence: AAG
ccagccggaaaagtagggga

SEQ ID NO: 7960 - DNA, 20 bp, Artificial Sequence
  Description of Artificial Sequence: Synthetic oligonucleotide
  Target: ANGPTL4; (-) strand; PAM type: NRG; PAM sequence: GGG
cagcccagccggaaaagtag

SEQ ID NO: 7961 - DNA, 20 bp, Artificial Sequence
  Description of Artificial Sequence: Synthetic oligonucleotide
  Target: ANGPTL4; (-) strand; PAM type: NRG; PAM sequence: GGG
ccagcccagccggaaaagta

SEQ ID NO: 7962 - DNA, 20 bp, Artificial Sequence
  Description of Artificial Sequence: Synthetic oligonucleotide
  Target: ANGPTL4; (-) strand; PAM type: NRG; PAM sequence: AGG
cccagcccagccggaaaagt

SEQ ID NO: 7963 - DNA, 20 bp, Artificial Sequence
  Description of Artificial Sequence: Synthetic oligonucleotide
  Target: ANGPTL4; (-) strand; PAM type: NRG; PAM sequence: TAG
ccccagcccagccggaaaag

SEQ ID NO: 7964 - DNA, 20 bp, Artificial Sequence
  Description of Artificial Sequence: Synthetic oligonucleotide
  Target: ANGPTL4; (-) strand; PAM type: NRG; PAM sequence: AAG
cgcccccagcccagccggaa

SEQ ID NO: 7965 - DNA, 20 bp, Artificial Sequence
  Description of Artificial Sequence: Synthetic oligonucleotide
  Target: ANGPTL4; (-) strand; PAM type: NRG; PAM sequence: CGG
ggaaccgcccccagcccagc

SEQ ID NO: 7966 - DNA, 20 bp, Artificial Sequence
  Description of Artificial Sequence: Synthetic oligonucleotide
  Target: ANGPTL4; (-) strand; PAM type: NRG; PAM sequence: CAG
gggaggaaccgcccccagcc

SEQ ID NO: 7967 - DNA, 20 bp, Artificial Sequence
  Description of Artificial Sequence: Synthetic oligonucleotide
  Target: ANGPTL4; (-) strand; PAM type: NRG; PAM sequence: CAG
agactgggaggaaccgcccc

SEQ ID NO: 7968 - DNA, 20 bp, Artificial Sequence
  Description of Artificial Sequence: Synthetic oligonucleotide
  Target: ANGPTL4; (-) strand; PAM type: NRG; PAM sequence: AGG
ctcagacgctccagactggg

SEQ ID NO: 7969 - DNA, 20 bp, Artificial Sequence
  Description of Artificial Sequence: Synthetic oligonucleotide
  Target: ANGPTL4; (-) strand; PAM type: NRG; PAM sequence: GAG
gctcagacgctccagactgg

SEQ ID NO: 7970 - DNA, 20 bp, Artificial Sequence
  Description of Artificial Sequence: Synthetic oligonucleotide
  Target: ANGPTL4; (-) strand; PAM type: NRG; PAM sequence: GGG
aggctcagacgctccagact

SEQ ID NO: 7971 - DNA, 20 bp, Artificial Sequence
  Description of Artificial Sequence: Synthetic oligonucleotide
  Target: ANGPTL4; (-) strand; PAM type: NRG; PAM sequence: TGG
gaggctcagacgctccagac

SEQ ID NO: 7972 - DNA, 20 bp, Artificial Sequence
  Description of Artificial Sequence: Synthetic oligonucleotide
  Target: ANGPTL4; (-) strand; PAM type: NRG; PAM sequence: CAG
gtctggaggctcagacgctc

SEQ ID NO: 7973 - DNA, 20 bp, Artificial Sequence
  Description of Artificial Sequence: Synthetic oligonucleotide
  Target: ANGPTL4; (-) strand; PAM type: NRG; PAM sequence: CAG
gttgagcacgtctggaggct

SEQ ID NO: 7974 - DNA, 20 bp, Artificial Sequence
  Description of Artificial Sequence: Synthetic oligonucleotide
  Target: ANGPTL4; (-) strand; PAM type: NRG; PAM sequence: AGG
atggcgttgagcacgtctgg

SEQ ID NO: 7975 - DNA, 20 bp, Artificial Sequence
  Description of Artificial Sequence: Synthetic oligonucleotide
  Target: ANGPTL4; (-) strand; PAM type: NRG; PAM sequence: GAG
gatggcgttgagcacgtctg

SEQ ID NO: 7976 - DNA, 20 bp, Artificial Sequence
  Description of Artificial Sequence: Synthetic oligonucleotide
  Target: ANGPTL4; (-) strand; PAM type: NRG; PAM sequence: TGG
aggatggcgttgagcacgtc

SEQ ID NO: 7977 - DNA, 20 bp, Artificial Sequence
  Description of Artificial Sequence: Synthetic oligonucleotide
  Target: ANGPTL4; (-) strand; PAM type: NRG; PAM sequence: GAG
gaggaggggaggatggcgtt

SEQ ID NO: 7978 - DNA, 20 bp, Artificial Sequence
  Description of Artificial Sequence: Synthetic oligonucleotide
  Target: ANGPTL4; (-) strand; PAM type: NRG; PAM sequence: TGG
agggagggaggaggggagga

SEQ ID NO: 7979 - DNA, 20 bp, Artificial Sequence
  Description of Artificial Sequence: Synthetic oligonucleotide
  Target: ANGPTL4; (-) strand; PAM type: NRG; PAM sequence: AGG
aaagagggagggaggagggg

SEQ ID NO: 7980 - DNA, 20 bp, Artificial Sequence
  Description of Artificial Sequence: Synthetic oligonucleotide
  Target: ANGPTL4; (-) strand; PAM type: NRG; PAM sequence: GAG
gaaagagggagggaggaggg

SEQ ID NO: 7981 - DNA, 20 bp, Artificial Sequence
  Description of Artificial Sequence: Synthetic oligonucleotide
  Target: ANGPTL4; (-) strand; PAM type: NRG; PAM sequence: GGG
aagaaagagggagggaggag

SEQ ID NO: 7982 - DNA, 20 bp, Artificial Sequence
  Description of Artificial Sequence: Synthetic oligonucleotide
  Target: ANGPTL4; (-) strand; PAM type: NRG; PAM sequence: GGG
aaagaaagagggagggagga

SEQ ID NO: 7983 - DNA, 20 bp, Artificial Sequence
  Description of Artificial Sequence: Synthetic oligonucleotide
  Target: ANGPTL4; (-) strand; PAM type: NRG; PAM sequence: AGG
gaaagaaagagggagggagg

SEQ ID NO: 7984 - DNA, 20 bp, Artificial Sequence
  Description of Artificial Sequence: Synthetic oligonucleotide
  Target: ANGPTL4; (-) strand; PAM type: NRG; PAM sequence: GAG
ggaaagaaagagggagggag

SEQ ID NO: 7985 - DNA, 20 bp, Artificial Sequence
  Description of Artificial Sequence: Synthetic oligonucleotide
  Target: ANGPTL4; (-) strand; PAM type: NRG; PAM sequence: AGG
gaggaaagaaagagggaggg

SEQ ID NO: 7986 - DNA, 20 bp, Artificial Sequence
  Description of Artificial Sequence: Synthetic oligonucleotide
  Target: ANGPTL4; (-) strand; PAM type: NRG; PAM sequence: GAG
tgaggaaagaaagagggagg

SEQ ID NO: 7987 - DNA, 20 bp, Artificial Sequence
  Description of Artificial Sequence: Synthetic oligonucleotide
  Target: ANGPTL4; (-) strand; PAM type: NRG; PAM sequence: GGG
gttgaggaaagaaagaggga

SEQ ID NO: 7988 - DNA, 20 bp, Artificial Sequence
  Description of Artificial Sequence: Synthetic oligonucleotide
  Target: ANGPTL4; (-) strand; PAM type: NRG; PAM sequence: AGG
ggttgaggaaagaaagaggg

SEQ ID NO: 7989 - DNA, 20 bp, Artificial Sequence
  Description of Artificial Sequence: Synthetic oligonucleotide
  Target: ANGPTL4; (-) strand; PAM type: NRG; PAM sequence: GAG
gggttgaggaaagaaagagg

SEQ ID NO: 7990 - DNA, 20 bp, Artificial Sequence
  Description of Artificial Sequence: Synthetic oligonucleotide
  Target: ANGPTL4; (-) strand; PAM type: NRG; PAM sequence: GGG
cagggttgaggaaagaaaga

SEQ ID NO: 7991 - DNA, 20 bp, Artificial Sequence
  Description of Artificial Sequence: Synthetic oligonucleotide
  Target: ANGPTL4; (-) strand; PAM type: NRG; PAM sequence: AGG
gcagggttgaggaaagaaag

SEQ ID NO: 7992 - DNA, 20 bp, Artificial Sequence
  Description of Artificial Sequence: Synthetic oligonucleotide
  Target: ANGPTL4; (-) strand; PAM type: NRG; PAM sequence: GAG
ggcagggttgaggaaagaaa

SEQ ID NO: 7993 - DNA, 20 bp, Artificial Sequence
  Description of Artificial Sequence: Synthetic oligonucleotide
  Target: ANGPTL4; (-) strand; PAM type: NRG; PAM sequence: AAG
gaggcagggttgaggaaaga

SEQ ID NO: 7994 - DNA, 20 bp, Artificial Sequence
  Description of Artificial Sequence: Synthetic oligonucleotide
  Target: ANGPTL4; (-) strand; PAM type: NRG; PAM sequence: AAG
agaggaggcagggttgagga

SEQ ID NO: 7995 - DNA, 20 bp, Artificial Sequence
  Description of Artificial Sequence: Synthetic oligonucleotide
  Target: ANGPTL4; (-) strand; PAM type: NRG; PAM sequence: AGG
agggagaggaggcagggttg

SEQ ID NO: 7996 - DNA, 20 bp, Artificial Sequence
  Description of Artificial Sequence: Synthetic oligonucleotide
  Target: ANGPTL4; (-) strand; PAM type: NRG; PAM sequence: GAG
gagggagaggaggcagggtt

SEQ ID NO: 7997 - DNA, 20 bp, Artificial Sequence
  Description of Artificial Sequence: Synthetic oligonucleotide
  Target: ANGPTL4; (-) strand; PAM type: NRG; PAM sequence: GGG
tcctagagggagaggaggca

SEQ ID NO: 7998 - DNA, 20 bp, Artificial Sequence
  Description of Artificial Sequence: Synthetic oligonucleotide
  Target: ANGPTL4; (-) strand; PAM type: NRG; PAM sequence: AGG
ctcctagagggagaggaggc

SEQ ID NO: 7999 - DNA, 20 bp, Artificial Sequence
  Description of Artificial Sequence: Synthetic oligonucleotide
  Target: ANGPTL4; (-) strand; PAM type: NRG; PAM sequence: CAG
gctcctagagggagaggagg

SEQ ID NO: 8000 - DNA, 20 bp, Artificial Sequence
  Description of Artificial Sequence: Synthetic oligonucleotide
  Target: ANGPTL4; (-) strand; PAM type: NRG; PAM sequence: AGG
ccagctcctagagggagagg

SEQ ID NO: 8001 - DNA, 20 bp, Artificial Sequence
  Description of Artificial Sequence: Synthetic oligonucleotide
  Target: ANGPTL4; (-) strand; PAM type: NRG; PAM sequence: GAG
cccagctcctagagggagag

SEQ ID NO: 8002 - DNA, 20 bp, Artificial Sequence
  Description of Artificial Sequence: Synthetic oligonucleotide
  Target: ANGPTL4; (-) strand; PAM type: NRG; PAM sequence: AGG
gtcccagctcctagagggag

SEQ ID NO: 8003 - DNA, 20 bp, Artificial Sequence
  Description of Artificial Sequence: Synthetic oligonucleotide
  Target: ANGPTL4; (-) strand; PAM type: NRG; PAM sequence: GAG
ggtcccagctcctagaggga

SEQ ID NO: 8004 - DNA, 20 bp, Artificial Sequence
  Description of Artificial Sequence: Synthetic oligonucleotide
  Target: ANGPTL4; (-) strand; PAM type: NRG; PAM sequence: GAG
ggggtcccagctcctagagg

SEQ ID NO: 8005 - DNA, 20 bp, Artificial Sequence
  Description of Artificial Sequence: Synthetic oligonucleotide
  Target: ANGPTL4; (-) strand; PAM type: NRG; PAM sequence: GGG
ctggggtcccagctcctaga

SEQ ID NO: 8006 - DNA, 20 bp, Artificial Sequence
  Description of Artificial Sequence: Synthetic oligonucleotide
  Target: ANGPTL4; (-) strand; PAM type: NRG; PAM sequence: AGG
cctggggtcccagctcctag

SEQ ID NO: 8007 - DNA, 20 bp, Artificial Sequence
  Description of Artificial Sequence: Synthetic oligonucleotide
  Target: ANGPTL4; (-) strand; PAM type: NRG; PAM sequence: GAG
gcctggggtcccagctccta

SEQ ID NO: 8008 - DNA, 20 bp, Artificial Sequence
  Description of Artificial Sequence: Synthetic oligonucleotide
  Target: ANGPTL4; (-) strand; PAM type: NRG; PAM sequence: TAG
ctgcctggggtcccagctcc

SEQ ID NO: 8009 - DNA, 20 bp, Artificial Sequence
  Description of Artificial Sequence: Synthetic oligonucleotide
  Target: ANGPTL4; (-) strand; PAM type: NRG; PAM sequence: CAG
agaggctctgcctggggtcc

SEQ ID NO: 8010 - DNA, 20 bp, Artificial Sequence
  Description of Artificial Sequence: Synthetic oligonucleotide
  Target: ANGPTL4; (-) strand; PAM type: NRG; PAM sequence: GGG
catctcagaggctctgcctg

SEQ ID NO: 8011 - DNA, 20 bp, Artificial Sequence
  Description of Artificial Sequence: Synthetic oligonucleotide
  Target: ANGPTL4; (-) strand; PAM type: NRG; PAM sequence: GGG
gcatctcagaggctctgcct

SEQ ID NO: 8012 - DNA, 20 bp, Artificial Sequence
  Description of Artificial Sequence: Synthetic oligonucleotide
  Target: ANGPTL4; (-) strand; PAM type: NRG; PAM sequence: TGG
agcatctcagaggctctgcc

SEQ ID NO: 8013 - DNA, 20 bp, Artificial Sequence
  Description of Artificial Sequence: Synthetic oligonucleotide
  Target: ANGPTL4; (-) strand; PAM type: NRG; PAM sequence: AGG
gctgagcaggagcatctcag

SEQ ID NO: 8014 - DNA, 20 bp, Artificial Sequence
  Description of Artificial Sequence: Synthetic oligonucleotide
  Target: ANGPTL4; (-) strand; PAM type: NRG; PAM sequence: GAG
tgctgagcaggagcatctca

SEQ ID NO: 8015 - DNA, 20 bp, Artificial Sequence
  Description of Artificial Sequence: Synthetic oligonucleotide
  Target: ANGPTL4; (-) strand; PAM type: NRG; PAM sequence: CAG
tgtgctgagcaggagcatct

SEQ ID NO: 8016 - DNA, 20 bp, Artificial Sequence
  Description of Artificial Sequence: Synthetic oligonucleotide
  Target: ANGPTL4; (-) strand; PAM type: NRG; PAM sequence: GAG
ggaagaactgtgctgagcag

SEQ ID NO: 8017 - DNA, 20 bp, Artificial Sequence
  Description of Artificial Sequence: Synthetic oligonucleotide
  Target: ANGPTL4; (-) strand; PAM type: NRG; PAM sequence: AGG
cgggaagaactgtgctgagc

SEQ ID NO: 8018 - DNA, 20 bp, Artificial Sequence
  Description of Artificial Sequence: Synthetic oligonucleotide
  Target: ANGPTL4; (-) strand; PAM type: NRG; PAM sequence: CAG
acgggaagaactgtgctgag

SEQ ID NO: 8019 - DNA, 20 bp, Artificial Sequence
  Description of Artificial Sequence: Synthetic oligonucleotide
  Target: ANGPTL4; (-) strand; PAM type: NRG; PAM sequence: GAG
agaacgggaagaactgtgct

SEQ ID NO: 8020 - DNA, 20 bp, Artificial Sequence
  Description of Artificial Sequence: Synthetic oligonucleotide
  Target: ANGPTL4; (-) strand; PAM type: NRG; PAM sequence: AAG
ggcagcaggtccagaacggg

SEQ ID NO: 8021 - DNA, 20 bp, Artificial Sequence
  Description of Artificial Sequence: Synthetic oligonucleotide
  Target: ANGPTL4; (-) strand; PAM type: NRG; PAM sequence: GGG
tgaggcagcaggtccagaac

SEQ ID NO: 8022 - DNA, 20 bp, Artificial Sequence
  Description of Artificial Sequence: Synthetic oligonucleotide
  Target: ANGPTL4; (-) strand; PAM type: NRG; PAM sequence: CGG
atgaggcagcaggtccagaa

SEQ ID NO: 8023 - DNA, 20 bp, Artificial Sequence
  Description of Artificial Sequence: Synthetic oligonucleotide
  Target: ANGPTL4; (-) strand; PAM type: NRG; PAM sequence: CAG
aatgaatgaggcagcaggtc

SEQ ID NO: 8024 - DNA, 20 bp, Artificial Sequence
  Description of Artificial Sequence: Synthetic oligonucleotide
  Target: ANGPTL4; (-) strand; PAM type: NRG; PAM sequence: AGG
gaatgaatgaatgaggcagc

SEQ ID NO: 8025 - DNA, 20 bp, Artificial Sequence
  Description of Artificial Sequence: Synthetic oligonucleotide
  Target: ANGPTL4; (-) strand; PAM type: NRG; PAM sequence: CAG
tgaatgaatgaatgaggcag

SEQ ID NO: 8026 - DNA, 20 bp, Artificial Sequence
  Description of Artificial Sequence: Synthetic oligonucleotide
  Target: ANGPTL4; (-) strand; PAM type: NRG; PAM sequence: CAG
gaatgaatgaatgaatgagg

SEQ ID NO: 8027 - DNA, 20 bp, Artificial Sequence
  Description of Artificial Sequence: Synthetic oligonucleotide
  Target: ANGPTL4; (-) strand; PAM type: NRG; PAM sequence: AGG
aatgaatgaatgaatgaatg

SEQ ID NO: 8028 - DNA, 20 bp, Artificial Sequence
  Description of Artificial Sequence: Synthetic oligonucleotide
  Target: ANGPTL4; (-) strand; PAM type: NRG; PAM sequence: GAG
gaatgaatgaatgaatgaat

SEQ ID NO: 8029 - DNA, 20 bp, Artificial Sequence
  Description of Artificial Sequence: Synthetic oligonucleotide
  Target: ANGPTL4; (-) strand; PAM type: NRG; PAM sequence: CAG
gtctcaaaaagcaaacaaaa

SEQ ID NO: 8030 - DNA, 20 bp, Artificial Sequence
  Description of Artificial Sequence: Synthetic oligonucleotide
  Target: ANGPTL4; (-) strand; PAM type: NRG; PAM sequence: AAG
gagcgagactccgtctcaaa

SEQ ID NO: 8031 - DNA, 20 bp, Artificial Sequence
  Description of Artificial Sequence: Synthetic oligonucleotide
  Target: ANGPTL4; (-) strand; PAM type: NRG; PAM sequence: GAG
tccagcctggacaacagagc

SEQ ID NO: 8032 - DNA, 20 bp, Artificial Sequence
  Description of Artificial Sequence: Synthetic oligonucleotide
  Target: ANGPTL4; (-) strand; PAM type: NRG; PAM sequence: GAG
gcactccagcctggacaaca

SEQ ID NO: 8033 - DNA, 20 bp, Artificial Sequence
  Description of Artificial Sequence: Synthetic oligonucleotide
  Target: ANGPTL4; (-) strand; PAM type: NRG; PAM sequence: CAG
ctgcactccagcctggacaa

SEQ ID NO: 8034 - DNA, 20 bp, Artificial Sequence
  Description of Artificial Sequence: Synthetic oligonucleotide
  Target: ANGPTL4; (-) strand; PAM type: NRG; PAM sequence: TGG
tgcgccactgcactccagcc

SEQ ID NO: 8035 - DNA, 20 bp, Artificial Sequence
  Description of Artificial Sequence: Synthetic oligonucleotide
  Target: ANGPTL4; (-) strand; PAM type: NRG; PAM sequence: CAG
gagattgcgccactgcactc

SEQ ID NO: 8036 - DNA, 20 bp, Artificial Sequence
  Description of Artificial Sequence: Synthetic oligonucleotide
  Target: ANGPTL4; (-) strand; PAM type: NRG; PAM sequence: GAG
ggcagaggttgcagtgagct

SEQ ID NO: 8037 - DNA, 20 bp, Artificial Sequence
  Description of Artificial Sequence: Synthetic oligonucleotide
  Target: ANGPTL4; (-) strand; PAM type: NRG; PAM sequence: GAG
tgggaggcagaggttgcagt

SEQ ID NO: 8038 - DNA, 20 bp, Artificial Sequence
  Description of Artificial Sequence: Synthetic oligonucleotide
  Target: ANGPTL4; (-) strand; PAM type: NRG; PAM sequence: CAG
ccagtgggaggcagaggttg

SEQ ID NO: 8039 - DNA, 20 bp, Artificial Sequence
  Description of Artificial Sequence: Synthetic oligonucleotide
  Target: ANGPTL4; (-) strand; PAM type: NRG; PAM sequence: AGG
ttgaacccagtgggaggcag

SEQ ID NO: 8040 - DNA, 20 bp, Artificial Sequence
  Description of Artificial Sequence: Synthetic oligonucleotide
  Target: ANGPTL4; (-) strand; PAM type: NRG; PAM sequence: GAG
cttgaacccagtgggaggca

SEQ ID NO: 8041 - DNA, 20 bp, Artificial Sequence
  Description of Artificial Sequence: Synthetic oligonucleotide
  Target: ANGPTL4; (-) strand; PAM type: NRG; PAM sequence: CAG
cacttgaacccagtgggagg

SEQ ID NO: 8042 - DNA, 20 bp, Artificial Sequence
  Description of Artificial Sequence: Synthetic oligonucleotide
  Target: ANGPTL4; (-) strand; PAM type: NRG; PAM sequence: AGG
aatcacttgaacccagtggg

SEQ ID NO: 8043 - DNA, 20 bp, Artificial Sequence
  Description of Artificial Sequence: Synthetic oligonucleotide
  Target: ANGPTL4; (-) strand; PAM type: NRG; PAM sequence: GAG
gaatcacttgaacccagtgg

SEQ ID NO: 8044 - DNA, 20 bp, Artificial Sequence
  Description of Artificial Sequence: Synthetic oligonucleotide
  Target: ANGPTL4; (-) strand; PAM type: NRG; PAM sequence: GGG
gagaatcacttgaacccagt

SEQ ID NO: 8045 - DNA, 20 bp, Artificial Sequence
  Description of Artificial Sequence: Synthetic oligonucleotide
  Target: ANGPTL4; (-) strand; PAM type: NRG; PAM sequence: TGG
ggagaatcacttgaacccag

SEQ ID NO: 8046 - DNA, 20 bp, Artificial Sequence
  Description of Artificial Sequence: Synthetic oligonucleotide
  Target: ANGPTL4; (-) strand; PAM type: NRG; PAM sequence: CAG
gcaggagaatcacttgaacc

SEQ ID NO: 8047 - DNA, 20 bp, Artificial Sequence
  Description of Artificial Sequence: Synthetic oligonucleotide
  Target: ANGPTL4; (-) strand; PAM type: NRG; PAM sequence: GAG
tacttgagaggctgaggcag

SEQ ID NO: 8048 - DNA, 20 bp, Artificial Sequence
  Description of Artificial Sequence: Synthetic oligonucleotide
  Target: ANGPTL4; (-) strand; PAM type: NRG; PAM sequence: AGG
tctacttgagaggctgaggc

SEQ ID NO: 8049 - DNA, 20 bp, Artificial Sequence
  Description of Artificial Sequence: Synthetic oligonucleotide
  Target: ANGPTL4; (-) strand; PAM type: NRG; PAM sequence: CAG
atctacttgagaggctgagg

SEQ ID NO: 8050 - DNA, 20 bp, Artificial Sequence
  Description of Artificial Sequence: Synthetic oligonucleotide
  Target: ANGPTL4; (-) strand; PAM type: NRG; PAM sequence: AGG
cccatctacttgagaggctg

SEQ ID NO: 8051 - DNA, 20 bp, Artificial Sequence
  Description of Artificial Sequence: Synthetic oligonucleotide
  Target: ANGPTL4; (-) strand; PAM type: NRG; PAM sequence: GAG
tcccatctacttgagaggct

SEQ ID NO: 8052 - DNA, 20 bp, Artificial Sequence
  Description of Artificial Sequence: Synthetic oligonucleotide
  Target: ANGPTL4; (-) strand; PAM type: NRG; PAM sequence: AGG
tataatcccatctacttgag

SEQ ID NO: 8053 - DNA, 20 bp, Artificial Sequence
  Description of Artificial Sequence: Synthetic oligonucleotide
  Target: ANGPTL4; (-) strand; PAM type: NRG; PAM sequence: GAG
ctataatcccatctacttga

SEQ ID NO: 8054 - DNA, 20 bp, Artificial Sequence
  Description of Artificial Sequence: Synthetic oligonucleotide
  Target: ANGPTL4; (-) strand; PAM type: NRG; PAM sequence: GAG
gcctataatcccatctactt

SEQ ID NO: 8055 - DNA, 20 bp, Artificial Sequence
  Description of Artificial Sequence: Synthetic oligonucleotide
  Target: ANGPTL4; (-) strand; PAM type: NRG; PAM sequence: AGG
tagctgggcgtggtggcggt

SEQ ID NO: 8056 - DNA, 20 bp, Artificial Sequence
  Description of Artificial Sequence: Synthetic oligonucleotide
  Target: ANGPTL4; (-) strand; PAM type: NRG; PAM sequence: TAG
ttagctgggcgtggtggcgg

SEQ ID NO: 8057 - DNA, 20 bp, Artificial Sequence
  Description of Artificial Sequence: Synthetic oligonucleotide
  Target: ANGPTL4; (-) strand; PAM type: NRG; PAM sequence: CGG
aaattagctgggcgtggtgg

SEQ ID NO: 8058 - DNA, 20 bp, Artificial Sequence
  Description of Artificial Sequence: Synthetic oligonucleotide
  Target: ANGPTL4; (-) strand; PAM type: NRG; PAM sequence: TGG
taaaaattagctgggcgtgg

SEQ ID NO: 8059 - DNA, 20 bp, Artificial Sequence
  Description of Artificial Sequence: Synthetic oligonucleotide
  Target: ANGPTL4; (-) strand; PAM type: NRG; PAM sequence: TGG
gaataaaaattagctgggcg

SEQ ID NO: 8060 - DNA, 20 bp, Artificial Sequence
  Description of Artificial Sequence: Synthetic oligonucleotide
  Target: ANGPTL4; (-) strand; PAM type: NRG; PAM sequence: GGG
taaatgaataaaaattagct

SEQ ID NO: 8061 - DNA, 20 bp, Artificial Sequence
  Description of Artificial Sequence: Synthetic oligonucleotide
  Target: ANGPTL4; (-) strand; PAM type: NRG; PAM sequence: TGG
ataaatgaataaaaattagc

SEQ ID NO: 8062 - DNA, 20 bp, Artificial Sequence
  Description of Artificial Sequence: Synthetic oligonucleotide
  Target: ANGPTL4; (-) strand; PAM type: NRG; PAM sequence: TAG
cttgataaatgaataaaaat

SEQ ID NO: 8063 - DNA, 20 bp, Artificial Sequence
  Description of Artificial Sequence: Synthetic oligonucleotide
  Target: ANGPTL4; (-) strand; PAM type: NRG; PAM sequence: AAG
actctgtctcaaaaaaaaaa

SEQ ID NO: 8064 - DNA, 20 bp, Artificial Sequence
  Description of Artificial Sequence: Synthetic oligonucleotide
  Target: ANGPTL4; (-) strand; PAM type: NRG; PAM sequence: GAG
tccaacctgggtgacagagt

SEQ ID NO: 8065 - DNA, 20 bp, Artificial Sequence
  Description of Artificial Sequence: Synthetic oligonucleotide
  Target: ANGPTL4; (-) strand; PAM type: NRG; PAM sequence: GAG
gcactccaacctgggtgaca

SEQ ID NO: 8066 - DNA, 20 bp, Artificial Sequence
  Description of Artificial Sequence: Synthetic oligonucleotide
  Target: ANGPTL4; (-) strand; PAM type: NRG; PAM sequence: CAG
ttgcactccaacctgggtga

SEQ ID NO: 8067 - DNA, 20 bp, Artificial Sequence
  Description of Artificial Sequence: Synthetic oligonucleotide
  Target: ANGPTL4; (-) strand; PAM type: NRG; PAM sequence: GGG
gaaccattgcactccaacct

SEQ ID NO: 8068 - DNA, 20 bp, Artificial Sequence
  Description of Artificial Sequence: Synthetic oligonucleotide
  Target: ANGPTL4; (-) strand; PAM type: NRG; PAM sequence: TGG
tgaaccattgcactccaacc

SEQ ID NO: 8069 - DNA, 20 bp, Artificial Sequence
  Description of Artificial Sequence: Synthetic oligonucleotide
  Target: ANGPTL4; (-) strand; PAM type: NRG; PAM sequence: AGG
gcagaggttgcagtcagctg

SEQ ID NO: 8070 - DNA, 20 bp, Artificial Sequence
  Description of Artificial Sequence: Synthetic oligonucleotide
  Target: ANGPTL4; (-) strand; PAM type: NRG; PAM sequence: GAG
ggcagaggttgcagtcagct

SEQ ID NO: 8071 - DNA, 20 bp, Artificial Sequence
  Description of Artificial Sequence: Synthetic oligonucleotide
  Target: ANGPTL4; (-) strand; PAM type: NRG; PAM sequence: CAG
cgggaggcagaggttgcagt

SEQ ID NO: 8072 - DNA, 20 bp, Artificial Sequence
  Description of Artificial Sequence: Synthetic oligonucleotide
  Target: ANGPTL4; (-) strand; PAM type: NRG; PAM sequence: CAG
aacccgggaggcagaggttg

SEQ ID NO: 8073 - DNA, 20 bp, Artificial Sequence
  Description of Artificial Sequence: Synthetic oligonucleotide
  Target: ANGPTL4; (-) strand; PAM type: NRG; PAM sequence: AGG
cacttgaacccgggaggcag

SEQ ID NO: 8074 - DNA, 20 bp, Artificial Sequence
  Description of Artificial Sequence: Synthetic oligonucleotide
  Target: ANGPTL4; (-) strand; PAM type: NRG; PAM sequence: GAG
tcacttgaacccgggaggca

SEQ ID NO: 8075 - DNA, 20 bp, Artificial Sequence
  Description of Artificial Sequence: Synthetic oligonucleotide
  Target: ANGPTL4; (-) strand; PAM type: NRG; PAM sequence: CAG
aatcacttgaacccgggagg

SEQ ID NO: 8076 - DNA, 20 bp, Artificial Sequence
  Description of Artificial Sequence: Synthetic oligonucleotide
  Target: ANGPTL4; (-) strand; PAM type: NRG; PAM sequence: AGG
gagaatcacttgaacccggg

SEQ ID NO: 8077 - DNA, 20 bp, Artificial Sequence
  Description of Artificial Sequence: Synthetic oligonucleotide
  Target: ANGPTL4; (-) strand; PAM type: NRG; PAM sequence: GAG
ggagaatcacttgaacccgg

SEQ ID NO: 8078 - DNA, 20 bp, Artificial Sequence
  Description of Artificial Sequence: Synthetic oligonucleotide
  Target: ANGPTL4; (-) strand; PAM type: NRG; PAM sequence: GGG
caggagaatcacttgaaccc

SEQ ID NO: 8079 - DNA, 20 bp, Artificial Sequence
  Description of Artificial Sequence: Synthetic oligonucleotide
  Target: ANGPTL4; (-) strand; PAM type: NRG; PAM sequence: CGG
gcaggagaatcacttgaacc

SEQ ID NO: 8080 - DNA, 20 bp, Artificial Sequence
  Description of Artificial Sequence: Synthetic oligonucleotide
  Target: ANGPTL4; (-) strand; PAM type: NRG; PAM sequence: GAG
tccttaggaggcagaggcag

SEQ ID NO: 8081 - DNA, 20 bp, Artificial Sequence
  Description of Artificial Sequence: Synthetic oligonucleotide
  Target: ANGPTL4; (-) strand; PAM type: NRG; PAM sequence: AGG
gctccttaggaggcagaggc

SEQ ID NO: 8082 - DNA, 20 bp, Artificial Sequence
  Description of Artificial Sequence: Synthetic oligonucleotide
  Target: ANGPTL4; (-) strand; PAM type: NRG; PAM sequence: CAG
agctccttaggaggcagagg

SEQ ID NO: 8083 - DNA, 20 bp, Artificial Sequence
  Description of Artificial Sequence: Synthetic oligonucleotide
  Target: ANGPTL4; (-) strand; PAM type: NRG; PAM sequence: AGG
cccagctccttaggaggcag

SEQ ID NO: 8084 - DNA, 20 bp, Artificial Sequence
  Description of Artificial Sequence: Synthetic oligonucleotide
  Target: ANGPTL4; (-) strand; PAM type: NRG; PAM sequence: GAG
tcccagctccttaggaggca

SEQ ID NO: 8085 - DNA, 20 bp, Artificial Sequence
  Description of Artificial Sequence: Synthetic oligonucleotide
  Target: ANGPTL4; (-) strand; PAM type: NRG; PAM sequence: CAG
aatcccagctccttaggagg

SEQ ID NO: 8086 - DNA, 20 bp, Artificial Sequence
  Description of Artificial Sequence: Synthetic oligonucleotide
  Target: ANGPTL4; (-) strand; PAM type: NRG; PAM sequence: AGG
agtaatcccagctccttagg

SEQ ID NO: 8087 - DNA, 20 bp, Artificial Sequence
  Description of Artificial Sequence: Synthetic oligonucleotide
  Target: ANGPTL4; (-) strand; PAM type: NRG; PAM sequence: GAG
cagtaatcccagctccttag

SEQ ID NO: 8088 - DNA, 20 bp, Artificial Sequence
  Description of Artificial Sequence: Synthetic oligonucleotide
  Target: ANGPTL4; (-) strand; PAM type: NRG; PAM sequence: AGG
gccagtaatcccagctcctt

SEQ ID NO: 8089 - DNA, 20 bp, Artificial Sequence
  Description of Artificial Sequence: Synthetic oligonucleotide
  Target: ANGPTL4; (-) strand; PAM type: NRG; PAM sequence: TAG
cgccagtaatcccagctcct

SEQ ID NO: 8090 - DNA, 20 bp, Artificial Sequence
  Description of Artificial Sequence: Synthetic oligonucleotide
  Target: ANGPTL4; (-) strand; PAM type: NRG; PAM sequence: CAG
atggtggacgccagtaatcc

SEQ ID NO: 8091 - DNA, 20 bp, Artificial Sequence
  Description of Artificial Sequence: Synthetic oligonucleotide
  Target: ANGPTL4; (-) strand; PAM type: NRG; PAM sequence: CAG
ctgggtgtgatggtggacgc

SEQ ID NO: 8092 - DNA, 20 bp, Artificial Sequence
  Description of Artificial Sequence: Synthetic oligonucleotide
  Target: ANGPTL4; (-) strand; PAM type: NRG; PAM sequence: TGG
agattagctgggtgtgatgg

SEQ ID NO: 8093 - DNA, 20 bp, Artificial Sequence
  Description of Artificial Sequence: Synthetic oligonucleotide
  Target: ANGPTL4; (-) strand; PAM type: NRG; PAM sequence: TGG
caaagattagctgggtgtga

SEQ ID NO: 8094 - DNA, 20 bp, Artificial Sequence
  Description of Artificial Sequence: Synthetic oligonucleotide
  Target: ANGPTL4; (-) strand; PAM type: NRG; PAM sequence: GGG
aaaacatacaaagattagct

SEQ ID NO: 8095 - DNA, 20 bp, Artificial Sequence
  Description of Artificial Sequence: Synthetic oligonucleotide
  Target: ANGPTL4; (-) strand; PAM type: NRG; PAM sequence: TGG
taaaacatacaaagattagc

SEQ ID NO: 8096 - DNA, 20 bp, Artificial Sequence
  Description of Artificial Sequence: Synthetic oligonucleotide
  Target: ANGPTL4; (-) strand; PAM type: NRG; PAM sequence: TAG
ctagtaaaacatacaaagat

SEQ ID NO: 8097 - DNA, 20 bp, Artificial Sequence
  Description of Artificial Sequence: Synthetic oligonucleotide
  Target: ANGPTL4; (-) strand; PAM type: NRG; PAM sequence: AAG
catctctagtaaaacataca

SEQ ID NO: 8098 - DNA, 20 bp, Artificial Sequence
  Description of Artificial Sequence: Synthetic oligonucleotide
  Target: ANGPTL4; (-) strand; PAM type: NRG; PAM sequence: TAG
acatggccaaaccccatctc

SEQ ID NO: 8099 - DNA, 20 bp, Artificial Sequence
  Description of Artificial Sequence: Synthetic oligonucleotide
  Target: ANGPTL4; (-) strand; PAM type: NRG; PAM sequence: TGG
tgagaccagcctggtcaaca

SEQ ID NO: 8100 - DNA, 20 bp, Artificial Sequence
  Description of Artificial Sequence: Synthetic oligonucleotide
  Target: ANGPTL4; (-) strand; PAM type: NRG; PAM sequence: TGG
tcaggagtttgagaccagcc

SEQ ID NO: 8101 - DNA, 20 bp, Artificial Sequence
  Description of Artificial Sequence: Synthetic oligonucleotide
  Target: ANGPTL4; (-) strand; PAM type: NRG; PAM sequence: CAG
atcggtcaggagtttgagac

SEQ ID NO: 8102 - DNA, 20 bp, Artificial Sequence
  Description of Artificial Sequence: Synthetic oligonucleotide
  Target: ANGPTL4; (-) strand; PAM type: NRG; PAM sequence: GAG
ggcggatcggtcaggagttt

SEQ ID NO: 8103 - DNA, 20 bp, Artificial Sequence
  Description of Artificial Sequence: Synthetic oligonucleotide
  Target: ANGPTL4; (-) strand; PAM type: NRG; PAM sequence: GAG
gaggcgggcggatcggtcag

SEQ ID NO: 8104 - DNA, 20 bp, Artificial Sequence
  Description of Artificial Sequence: Synthetic oligonucleotide
  Target: ANGPTL4; (-) strand; PAM type: NRG; PAM sequence: AGG
gggaggcgggcggatcggtc

SEQ ID NO: 8105 - DNA, 20 bp, Artificial Sequence
  Description of Artificial Sequence: Synthetic oligonucleotide
  Target: ANGPTL4; (-) strand; PAM type: NRG; PAM sequence: CAG
tgggaggcgggcggatcggt

SEQ ID NO: 8106 - DNA, 20 bp, Artificial Sequence
  Description of Artificial Sequence: Synthetic oligonucleotide
  Target: ANGPTL4; (-) strand; PAM type: NRG; PAM sequence: CGG
actttgggaggcgggcggat

SEQ ID NO: 8107 - DNA, 20 bp, Artificial Sequence
  Description of Artificial Sequence: Synthetic oligonucleotide
  Target: ANGPTL4; (-) strand; PAM type: NRG; PAM sequence: CGG
ccagcactttgggaggcggg

SEQ ID NO: 8108 - DNA, 20 bp, Artificial Sequence
  Description of Artificial Sequence: Synthetic oligonucleotide
  Target: ANGPTL4; (-) strand; PAM type: NRG; PAM sequence: GGG
aatccagcactttgggaggc

SEQ ID NO: 8109 - DNA, 20 bp, Artificial Sequence
  Description of Artificial Sequence: Synthetic oligonucleotide
  Target: ANGPTL4; (-) strand; PAM type: NRG; PAM sequence: CGG
taatccagcactttgggagg

SEQ ID NO: 8110 - DNA, 20 bp, Artificial Sequence
  Description of Artificial Sequence: Synthetic oligonucleotide
  Target: ANGPTL4; (-) strand; PAM type: NRG; PAM sequence: AGG
ctgtaatccagcactttggg

SEQ ID NO: 8111 - DNA, 20 bp, Artificial Sequence
  Description of Artificial Sequence: Synthetic oligonucleotide
  Target: ANGPTL4; (-) strand; PAM type: NRG; PAM sequence: GAG
cctgtaatccagcactttgg

SEQ ID NO: 8112 - DNA, 20 bp, Artificial Sequence
  Description of Artificial Sequence: Synthetic oligonucleotide
  Target: ANGPTL4; (-) strand; PAM type: NRG; PAM sequence: GGG
tgcctgtaatccagcacttt

SEQ ID NO: 8113 - DNA, 20 bp, Artificial Sequence
  Description of Artificial Sequence: Synthetic oligonucleotide
  Target: ANGPTL4; (-) strand; PAM type: NRG; PAM sequence: TGG
atgcctgtaatccagcactt

SEQ ID NO: 8114 - DNA, 20 bp, Artificial Sequence
  Description of Artificial Sequence: Synthetic oligonucleotide
  Target: ANGPTL4; (-) strand; PAM type: NRG; PAM sequence: CAG
agtggttcatgcctgtaatc

SEQ ID NO: 8115 - DNA, 20 bp, Artificial Sequence
  Description of Artificial Sequence: Synthetic oligonucleotide
  Target: ANGPTL4; (-) strand; PAM type: NRG; PAM sequence: TGG
gaggaatgggccgggcgcag

SEQ ID NO: 8116 - DNA, 20 bp, Artificial Sequence
  Description of Artificial Sequence: Synthetic oligonucleotide
  Target: ANGPTL4; (-) strand; PAM type: NRG; PAM sequence: CAG
cttgaggaatgggccgggcg

SEQ ID NO: 8117 - DNA, 20 bp, Artificial Sequence
  Description of Artificial Sequence: Synthetic oligonucleotide
  Target: ANGPTL4; (-) strand; PAM type: NRG; PAM sequence: GGG
aaagacttgaggaatgggcc

SEQ ID NO: 8118 - DNA, 20 bp, Artificial Sequence
  Description of Artificial Sequence: Synthetic oligonucleotide
  Target: ANGPTL4; (-) strand; PAM type: NRG; PAM sequence: CGG
taaagacttgaggaatgggc

SEQ ID NO: 8119 - DNA, 20 bp, Artificial Sequence
  Description of Artificial Sequence: Synthetic oligonucleotide
  Target: ANGPTL4; (-) strand; PAM type: NRG; PAM sequence: GGG
tcaataaagacttgaggaat

SEQ ID NO: 8120 - DNA, 20 bp, Artificial Sequence
  Description of Artificial Sequence: Synthetic oligonucleotide
  Target: ANGPTL4; (-) strand; PAM type: NRG; PAM sequence: TGG
ctcaataaagacttgaggaa

SEQ ID NO: 8121 - DNA, 20 bp, Artificial Sequence
  Description of Artificial Sequence: Synthetic oligonucleotide
  Target: ANGPTL4; (-) strand; PAM type: NRG; PAM sequence: AGG
agctgctcaataaagacttg

SEQ ID NO: 8122 - DNA, 20 bp, Artificial Sequence
  Description of Artificial Sequence: Synthetic oligonucleotide
  Target: ANGPTL4; (-) strand; PAM type: NRG; PAM sequence: GAG
cagctgctcaataaagactt

SEQ ID NO: 8123 - DNA, 20 bp, Artificial Sequence
  Description of Artificial Sequence: Synthetic oligonucleotide
  Target: ANGPTL4; (-) strand; PAM type: NRG; PAM sequence: AAG
cgcatagcagctgctcaata

SEQ ID NO: 8124 - DNA, 20 bp, Artificial Sequence
  Description of Artificial Sequence: Synthetic oligonucleotide
  Target: ANGPTL4; (-) strand; PAM type: NRG; PAM sequence: CAG
acgcaggccccagcgcatag

SEQ ID NO: 8125 - DNA, 20 bp, Artificial Sequence
  Description of Artificial Sequence: Synthetic oligonucleotide
  Target: ANGPTL4; (-) strand; PAM type: NRG; PAM sequence: TAG
tccacgcaggccccagcgca

SEQ ID NO: 8126 - DNA, 20 bp, Artificial Sequence
  Description of Artificial Sequence: Synthetic oligonucleotide
  Target: ANGPTL4; (-) strand; PAM type: NRG; PAM sequence: CAG
accagcatccacgcaggccc

SEQ ID NO: 8127 - DNA, 20 bp, Artificial Sequence
  Description of Artificial Sequence: Synthetic oligonucleotide
  Target: ANGPTL4; (-) strand; PAM type: NRG; PAM sequence: AGG
cctggcaccagcatccacgc

SEQ ID NO: 8128 - DNA, 20 bp, Artificial Sequence
  Description of Artificial Sequence: Synthetic oligonucleotide
  Target: ANGPTL4; (-) strand; PAM type: NRG; PAM sequence: CAG
gcctggcaccagcatccacg

SEQ ID NO: 8129 - DNA, 20 bp, Artificial Sequence
  Description of Artificial Sequence: Synthetic oligonucleotide
  Target: ANGPTL4; (-) strand; PAM type: NRG; PAM sequence: CAG
ctctgcccacagcctggcac

SEQ ID NO: 8130 - DNA, 20 bp, Artificial Sequence
  Description of Artificial Sequence: Synthetic oligonucleotide
  Target: ANGPTL4; (-) strand; PAM type: NRG; PAM sequence: TGG
gagcagctctgcccacagcc

SEQ ID NO: 8131 - DNA, 20 bp, Artificial Sequence
  Description of Artificial Sequence: Synthetic oligonucleotide
  Target: ANGPTL4; (-) strand; PAM type: NRG; PAM sequence: CAG
acaaggagcagctctgccca

SEQ ID NO: 8132 - DNA, 20 bp, Artificial Sequence
  Description of Artificial Sequence: Synthetic oligonucleotide
  Target: ANGPTL4; (-) strand; PAM type: NRG; PAM sequence: CAG
atgaggctggggacaaggag

SEQ ID NO: 8133 - DNA, 20 bp, Artificial Sequence
  Description of Artificial Sequence: Synthetic oligonucleotide
  Target: ANGPTL4; (-) strand; PAM type: NRG; PAM sequence: GAG
tccatgaggctggggacaag

SEQ ID NO: 8134 - DNA, 20 bp, Artificial Sequence
  Description of Artificial Sequence: Synthetic oligonucleotide
  Target: ANGPTL4; (-) strand; PAM type: NRG; PAM sequence: AGG
gctccatgaggctggggaca

SEQ ID NO: 8135 - DNA, 20 bp, Artificial Sequence
  Description of Artificial Sequence: Synthetic oligonucleotide
  Target: ANGPTL4; (-) strand; PAM type: NRG; PAM sequence: AAG
ggctccatgaggctggggac

SEQ ID NO: 8136 - DNA, 20 bp, Artificial Sequence
  Description of Artificial Sequence: Synthetic oligonucleotide
  Target: ANGPTL4; (-) strand; PAM type: NRG; PAM sequence: GGG
atggaggctccatgaggctg

SEQ ID NO: 8137 - DNA, 20 bp, Artificial Sequence
  Description of Artificial Sequence: Synthetic oligonucleotide
  Target: ANGPTL4; (-) strand; PAM type: NRG; PAM sequence: GGG
aatggaggctccatgaggct

SEQ ID NO: 8138 - DNA, 20 bp, Artificial Sequence
  Description of Artificial Sequence: Synthetic oligonucleotide
  Target: ANGPTL4; (-) strand; PAM type: NRG; PAM sequence: TGG
caatggaggctccatgaggc

SEQ ID NO: 8139 - DNA, 20 bp, Artificial Sequence
  Description of Artificial Sequence: Synthetic oligonucleotide
  Target: ANGPTL4; (-) strand; PAM type: NRG; PAM sequence: AGG
gactcaatggaggctccatg

SEQ ID NO: 8140 - DNA, 20 bp, Artificial Sequence
  Description of Artificial Sequence: Synthetic oligonucleotide
  Target: ANGPTL4; (-) strand; PAM type: NRG; PAM sequence: GAG
tgactcaatggaggctccat

SEQ ID NO: 8141 - DNA, 20 bp, Artificial Sequence
  Description of Artificial Sequence: Synthetic oligonucleotide
  Target: ANGPTL4; (-) strand; PAM type: NRG; PAM sequence: AGG
tctctcctctgactcaatgg

SEQ ID NO: 8142 - DNA, 20 bp, Artificial Sequence
  Description of Artificial Sequence: Synthetic oligonucleotide
  Target: ANGPTL4; (-) strand; PAM type: NRG; PAM sequence: GAG
gtctctcctctgactcaatg

SEQ ID NO: 8143 - DNA, 20 bp, Artificial Sequence
  Description of Artificial Sequence: Synthetic oligonucleotide
  Target: ANGPTL4; (-) strand; PAM type: NRG; PAM sequence: TGG
tggtctctcctctgactcaa

SEQ ID NO: 8144 - DNA, 20 bp, Artificial Sequence
  Description of Artificial Sequence: Synthetic oligonucleotide
  Target: ANGPTL4; (-) strand; PAM type: NRG; PAM sequence: TGG
tggacactgaggtcatctaa

SEQ ID NO: 8145 - DNA, 20 bp, Artificial Sequence
  Description of Artificial Sequence: Synthetic oligonucleotide
  Target: ANGPTL4; (-) strand; PAM type: NRG; PAM sequence: AGG
cttcccactcctggacactg

SEQ ID NO: 8146 - DNA, 20 bp, Artificial Sequence
  Description of Artificial Sequence: Synthetic oligonucleotide
  Target: ANGPTL4; (-) strand; PAM type: NRG; PAM sequence: GAG
acttcccactcctggacact

SEQ ID NO: 8147 - DNA, 20 bp, Artificial Sequence
  Description of Artificial Sequence: Synthetic oligonucleotide
  Target: ANGPTL4; (-) strand; PAM type: NRG; PAM sequence: TGG
gagcaaggacttcccactcc

SEQ ID NO: 8148 - DNA, 20 bp, Artificial Sequence
  Description of Artificial Sequence: Synthetic oligonucleotide
  Target: ANGPTL4; (-) strand; PAM type: NRG; PAM sequence: AGG
ccccaaatgggaattgagca

SEQ ID NO: 8149 - DNA, 20 bp, Artificial Sequence
  Description of Artificial Sequence: Synthetic oligonucleotide
  Target: ANGPTL4; (-) strand; PAM type: NRG; PAM sequence: AAG
accccaaatgggaattgagc

SEQ ID NO: 8150 - DNA, 20 bp, Artificial Sequence
  Description of Artificial Sequence: Synthetic oligonucleotide
  Target: ANGPTL4; (-) strand; PAM type: NRG; PAM sequence: GAG
gaacaccccaaatgggaatt

SEQ ID NO: 8151 - DNA, 20 bp, Artificial Sequence
  Description of Artificial Sequence: Synthetic oligonucleotide
  Target: ANGPTL4; (-) strand; PAM type: NRG; PAM sequence: GGG
caggccagaacaccccaaat

SEQ ID NO: 8152 - DNA, 20 bp, Artificial Sequence
  Description of Artificial Sequence: Synthetic oligonucleotide
  Target: ANGPTL4; (-) strand; PAM type: NRG; PAM sequence: TGG
ccaggccagaacaccccaaa

SEQ ID NO: 8153 - DNA, 20 bp, Artificial Sequence
  Description of Artificial Sequence: Synthetic oligonucleotide
  Target: ANGPTL4; (-) strand; PAM type: NRG; PAM sequence: CAG
gcctcacccccagaccaggc

SEQ ID NO: 8154 - DNA, 20 bp, Artificial Sequence
  Description of Artificial Sequence: Synthetic oligonucleotide
  Target: ANGPTL4; (-) strand; PAM type: NRG; PAM sequence: AGG
ccttgcctcacccccagacc

SEQ ID NO: 8155 - DNA, 20 bp, Artificial Sequence
  Description of Artificial Sequence: Synthetic oligonucleotide
  Target: ANGPTL4; (-) strand; PAM type: NRG; PAM sequence: CAG
gccttgcctcacccccagac

SEQ ID NO: 8156 - DNA, 20 bp, Artificial Sequence
  Description of Artificial Sequence: Synthetic oligonucleotide
  Target: ANGPTL4; (-) strand; PAM type: NRG; PAM sequence: CAG
accctgccttgcctcacccc

SEQ ID NO: 8157 - DNA, 20 bp, Artificial Sequence
  Description of Artificial Sequence: Synthetic oligonucleotide
  Target: ANGPTL4; (-) strand; PAM type: NRG; PAM sequence: AGG
tctgggtcccagcttctgga

SEQ ID NO: 8158 - DNA, 20 bp, Artificial Sequence
  Description of Artificial Sequence: Synthetic oligonucleotide
  Target: ANGPTL4; (-) strand; PAM type: NRG; PAM sequence: AAG
ctctgggtcccagcttctgg

SEQ ID NO: 8159 - DNA, 20 bp, Artificial Sequence
  Description of Artificial Sequence: Synthetic oligonucleotide
  Target: ANGPTL4; (-) strand; PAM type: NRG; PAM sequence: TGG
tctctctgggtcccagcttc

SEQ ID NO: 8160 - DNA, 20 bp, Artificial Sequence
  Description of Artificial Sequence: Synthetic oligonucleotide
  Target: ANGPTL4; (-) strand; PAM type: NRG; PAM sequence: CAG
tcacttctctctctgggtcc

SEQ ID NO: 8161 - DNA, 20 bp, Artificial Sequence
  Description of Artificial Sequence: Synthetic oligonucleotide
  Target: ANGPTL4; (-) strand; PAM type: NRG; PAM sequence: GGG
ctttcctcacttctctctct

SEQ ID NO: 8162 - DNA, 20 bp, Artificial Sequence
  Description of Artificial Sequence: Synthetic oligonucleotide
  Target: ANGPTL4; (-) strand; PAM type: NRG; PAM sequence: TGG
tctttcctcacttctctctc

SEQ ID NO: 8163 - DNA, 20 bp, Artificial Sequence
  Description of Artificial Sequence: Synthetic oligonucleotide
  Target: ANGPTL4; (-) strand; PAM type: NRG; PAM sequence: GGG
tgtgaaccactgcgcccggc

SEQ ID NO: 8164 - DNA, 20 bp, Artificial Sequence
  Description of Artificial Sequence: Synthetic oligonucleotide
  Target: ANGPTL4; (-) strand; PAM type: NRG; PAM sequence: CGG
gtgtgaaccactgcgcccgg

SEQ ID NO: 8165 - DNA, 20 bp, Artificial Sequence
  Description of Artificial Sequence: Synthetic oligonucleotide
  Target: ANGPTL4; (-) strand; PAM type: NRG; PAM sequence: CGG
caggtgtgaaccactgcgcc

SEQ ID NO: 8166 - DNA, 20 bp, Artificial Sequence
  Description of Artificial Sequence: Synthetic oligonucleotide
  Target: ANGPTL4; (-) strand; PAM type: NRG; PAM sequence: AGG
tcccaaagtgctgggattac

SEQ ID NO: 8167 - DNA, 20 bp, Artificial Sequence
  Description of Artificial Sequence: Synthetic oligonucleotide
  Target: ANGPTL4; (-) strand; PAM type: NRG; PAM sequence: CAG
ctcccaaagtgctgggatta

SEQ ID NO: 8168 - DNA, 20 bp, Artificial Sequence
  Description of Artificial Sequence: Synthetic oligonucleotide
  Target: ANGPTL4; (-) strand; PAM type: NRG; PAM sequence: GGG
ccttggcctcccaaagtgct

SEQ ID NO: 8169 - DNA, 20 bp, Artificial Sequence
  Description of Artificial Sequence: Synthetic oligonucleotide
  Target: ANGPTL4; (-) strand; PAM type: NRG; PAM sequence: TGG
gccttggcctcccaaagtgc

SEQ ID NO: 8170 - DNA, 20 bp, Artificial Sequence
  Description of Artificial Sequence: Synthetic oligonucleotide
  Target: ANGPTL4; (-) strand; PAM type: NRG; PAM sequence: AAG
ccgccagccttggcctccca

SEQ ID NO: 8171 - DNA, 20 bp, Artificial Sequence
  Description of Artificial Sequence: Synthetic oligonucleotide
  Target: ANGPTL4; (-) strand; PAM type: NRG; PAM sequence: TGG
acctcgtgatccgccagcct

SEQ ID NO: 8172 - DNA, 20 bp, Artificial Sequence
  Description of Artificial Sequence: Synthetic oligonucleotide
  Target: ANGPTL4; (-) strand; PAM type: NRG; PAM sequence: CAG
ctcctgacctcgtgatccgc

SEQ ID NO: 8173 - DNA, 20 bp, Artificial Sequence
  Description of Artificial Sequence: Synthetic oligonucleotide
  Target: ANGPTL4; (-) strand; PAM type: NRG; PAM sequence: TGG
tttcaccatgttggccagac

SEQ ID NO: 8174 - DNA, 20 bp, Artificial Sequence
  Description of Artificial Sequence: Synthetic oligonucleotide
  Target: ANGPTL4; (-) strand; PAM type: NRG; PAM sequence: CAG
gggggtttcaccatgttggc

SEQ ID NO: 8175 - DNA, 20 bp, Artificial Sequence
  Description of Artificial Sequence: Synthetic oligonucleotide
  Target: ANGPTL4; (-) strand; PAM type: NRG; PAM sequence: TGG
agacgggggtttcaccatgt

SEQ ID NO: 8176 - DNA, 20 bp, Artificial Sequence
  Description of Artificial Sequence: Synthetic oligonucleotide
  Target: ANGPTL4; (-) strand; PAM type: NRG; PAM sequence: GGG
tgcattatttgtagagacgg

SEQ ID NO: 8177 - DNA, 20 bp, Artificial Sequence
  Description of Artificial Sequence: Synthetic oligonucleotide
  Target: ANGPTL4; (-) strand; PAM type: NRG; PAM sequence: GGG
ttgcattatttgtagagacg

SEQ ID NO: 8178 - DNA, 20 bp, Artificial Sequence
  Description of Artificial Sequence: Synthetic oligonucleotide
  Target: ANGPTL4; (-) strand; PAM type: NRG; PAM sequence: GGG
tttgcattatttgtagagac

SEQ ID NO: 8179 - DNA, 20 bp, Artificial Sequence
  Description of Artificial Sequence: Synthetic oligonucleotide
  Target: ANGPTL4; (-) strand; PAM type: NRG; PAM sequence: CGG
ttttgcattatttgtagaga

SEQ ID NO: 8180 - DNA, 20 bp, Artificial Sequence
  Description of Artificial Sequence: Synthetic oligonucleotide
  Target: ANGPTL4; (-) strand; PAM type: NRG; PAM sequence: GAG
tagtttttgcattatttgta

SEQ ID NO: 8181 - DNA, 20 bp, Artificial Sequence
  Description of Artificial Sequence: Synthetic oligonucleotide
  Target: ANGPTL4; (-) strand; PAM type: NRG; PAM sequence: TAG
actagtttttgcattatttg

SEQ ID NO: 8182 - DNA, 20 bp, Artificial Sequence
  Description of Artificial Sequence: Synthetic oligonucleotide
  Target: ANGPTL4; (-) strand; PAM type: NRG; PAM sequence: TAG
catgtgccaccacgcccgac

SEQ ID NO: 8183 - DNA, 20 bp, Artificial Sequence
  Description of Artificial Sequence: Synthetic oligonucleotide
  Target: ANGPTL4; (-) strand; PAM type: NRG; PAM sequence: AGG
tccggagcagctgggactac

SEQ ID NO: 8184 - DNA, 20 bp, Artificial Sequence
  Description of Artificial Sequence: Synthetic oligonucleotide
  Target: ANGPTL4; (-) strand; PAM type: NRG; PAM sequence: CAG
ctccggagcagctgggacta

SEQ ID NO: 8185 - DNA, 20 bp, Artificial Sequence
  Description of Artificial Sequence: Synthetic oligonucleotide
  Target: ANGPTL4; (-) strand; PAM type: NRG; PAM sequence: GGG
ccgcagcctccggagcagct

SEQ ID NO: 8186 - DNA, 20 bp, Artificial Sequence
  Description of Artificial Sequence: Synthetic oligonucleotide
  Target: ANGPTL4; (-) strand; PAM type: NRG; PAM sequence: TGG
gccgcagcctccggagcagc

SEQ ID NO: 8187 - DNA, 20 bp, Artificial Sequence
  Description of Artificial Sequence: Synthetic oligonucleotide
  Target: ANGPTL4; (-) strand; PAM type: NRG; PAM sequence: CAG
ttctgccgcagcctccggag

SEQ ID NO: 8188 - DNA, 20 bp, Artificial Sequence
  Description of Artificial Sequence: Synthetic oligonucleotide
  Target: ANGPTL4; (-) strand; PAM type: NRG; PAM sequence: GAG
caattctgccgcagcctccg

SEQ ID NO: 8189 - DNA, 20 bp, Artificial Sequence
  Description of Artificial Sequence: Synthetic oligonucleotide
  Target: ANGPTL4; (-) strand; PAM type: NRG; PAM sequence: CGG
agcaattctgccgcagcctc

SEQ ID NO: 8190 - DNA, 20 bp, Artificial Sequence
  Description of Artificial Sequence: Synthetic oligonucleotide
  Target: ANGPTL4; (-) strand; PAM type: NRG; PAM sequence: CAG
aggttcaagcaattctgccg

SEQ ID NO: 8191 - DNA, 20 bp, Artificial Sequence
  Description of Artificial Sequence: Synthetic oligonucleotide
  Target: ANGPTL4; (-) strand; PAM type: NRG; PAM sequence: AAG
aacctccgcctcccaggttc

SEQ ID NO: 8192 - DNA, 20 bp, Artificial Sequence
  Description of Artificial Sequence: Synthetic oligonucleotide
  Target: ANGPTL4; (-) strand; PAM type: NRG; PAM sequence: AGG
cactgcaacctccgcctccc

SEQ ID NO: 8193 - DNA, 20 bp, Artificial Sequence
  Description of Artificial Sequence: Synthetic oligonucleotide
  Target: ANGPTL4; (-) strand; PAM type: NRG; PAM sequence: CAG
tcactgcaacctccgcctcc

SEQ ID NO: 8194 - DNA, 20 bp, Artificial Sequence
  Description of Artificial Sequence: Synthetic oligonucleotide
  Target: ANGPTL4; (-) strand; PAM type: NRG; PAM sequence: TGG
ggagtgcagtggcgcaatct

SEQ ID NO: 8195 - DNA, 20 bp, Artificial Sequence
  Description of Artificial Sequence: Synthetic oligonucleotide
  Target: ANGPTL4; (-) strand; PAM type: NRG; PAM sequence: TGG
gtcgccaggctggagtgcag

SEQ ID NO: 8196 - DNA, 20 bp, Artificial Sequence
  Description of Artificial Sequence: Synthetic oligonucleotide
  Target: ANGPTL4; (-) strand; PAM type: NRG; PAM sequence: CAG
tctgtcgccaggctggagtg

SEQ ID NO: 8197 - DNA, 20 bp, Artificial Sequence
  Description of Artificial Sequence: Synthetic oligonucleotide
  Target: ANGPTL4; (-) strand; PAM type: NRG; PAM sequence: GAG
ctcgctctgtcgccaggctg

SEQ ID NO: 8198 - DNA, 20 bp, Artificial Sequence
  Description of Artificial Sequence: Synthetic oligonucleotide
  Target: ANGPTL4; (-) strand; PAM type: NRG; PAM sequence: TGG
gtctcgctctgtcgccaggc

SEQ ID NO: 8199 - DNA, 20 bp, Artificial Sequence
  Description of Artificial Sequence: Synthetic oligonucleotide
  Target: ANGPTL4; (-) strand; PAM type: NRG; PAM sequence: AGG
cggagtctcgctctgtcgcc

SEQ ID NO: 8200 - DNA, 20 bp, Artificial Sequence
  Description of Artificial Sequence: Synthetic oligonucleotide
  Target: ANGPTL4; (-) strand; PAM type: NRG; PAM sequence: CAG
acggagtctcgctctgtcgc

SEQ ID NO: 8201 - DNA, 20 bp, Artificial Sequence
  Description of Artificial Sequence: Synthetic oligonucleotide
  Target: ANGPTL4; (-) strand; PAM type: NRG; PAM sequence: GAG
ttgttttgttttttgatacg

SEQ ID NO: 8202 - DNA, 20 bp, Artificial Sequence
  Description of Artificial Sequence: Synthetic oligonucleotide
  Target: ANGPTL4; (-) strand; PAM type: NRG; PAM sequence: CGG
ttttgttttgttttttgata

SEQ ID NO: 8203 - DNA, 20 bp, Artificial Sequence
  Description of Artificial Sequence: Synthetic oligonucleotide
  Target: ANGPTL4; (-) strand; PAM type: NRG; PAM sequence: GGG
acatgctgttccccctgcct

SEQ ID NO: 8204 - DNA, 20 bp, Artificial Sequence
  Description of Artificial Sequence: Synthetic oligonucleotide
  Target: ANGPTL4; (-) strand; PAM type: NRG; PAM sequence: TGG
cacatgctgttccccctgcc

SEQ ID NO: 8205 - DNA, 20 bp, Artificial Sequence
  Description of Artificial Sequence: Synthetic oligonucleotide
  Target: ANGPTL4; (-) strand; PAM type: NRG; PAM sequence: GGG
ccacacaccgtcctgccaca

SEQ ID NO: 8206 - DNA, 20 bp, Artificial Sequence
  Description of Artificial Sequence: Synthetic oligonucleotide
  Target: ANGPTL4; (-) strand; PAM type: NRG; PAM sequence: AGG
accacacaccgtcctgccac

SEQ ID NO: 8207 - DNA, 20 bp, Artificial Sequence
  Description of Artificial Sequence: Synthetic oligonucleotide
  Target: ANGPTL4; (-) strand; PAM type: NRG; PAM sequence: CAG
taccacacaccgtcctgcca

SEQ ID NO: 8208 - DNA, 20 bp, Artificial Sequence
  Description of Artificial Sequence: Synthetic oligonucleotide
  Target: ANGPTL4; (-) strand; PAM type: NRG; PAM sequence: AGG
ccacaccctctctggcacac

SEQ ID NO: 8209 - DNA, 20 bp, Artificial Sequence
  Description of Artificial Sequence: Synthetic oligonucleotide
  Target: ANGPTL4; (-) strand; PAM type: NRG; PAM sequence: CAG
cccacaccctctctggcaca

SEQ ID NO: 8210 - DNA, 20 bp, Artificial Sequence
  Description of Artificial Sequence: Synthetic oligonucleotide
  Target: ANGPTL4; (-) strand; PAM type: NRG; PAM sequence: TGG
tgctgtacccacaccctctc

SEQ ID NO: 8211 - DNA, 20 bp, Artificial Sequence
  Description of Artificial Sequence: Synthetic oligonucleotide
  Target: ANGPTL4; (-) strand; PAM type: NRG; PAM sequence: CAG
ccacaaggcacctggaggac

SEQ ID NO: 8212 - DNA, 20 bp, Artificial Sequence
  Description of Artificial Sequence: Synthetic oligonucleotide
  Target: ANGPTL4; (-) strand; PAM type: NRG; PAM sequence: AGG
atggtccacaaggcacctgg

SEQ ID NO: 8213 - DNA, 20 bp, Artificial Sequence
  Description of Artificial Sequence: Synthetic oligonucleotide
  Target: ANGPTL4; (-) strand; PAM type: NRG; PAM sequence: GAG
catggtccacaaggcacctg

SEQ ID NO: 8214 - DNA, 20 bp, Artificial Sequence
  Description of Artificial Sequence: Synthetic oligonucleotide
  Target: ANGPTL4; (-) strand; PAM type: NRG; PAM sequence: TGG
agcatggtccacaaggcacc

SEQ ID NO: 8215 - DNA, 20 bp, Artificial Sequence
  Description of Artificial Sequence: Synthetic oligonucleotide
  Target: ANGPTL4; (-) strand; PAM type: NRG; PAM sequence: AGG
cttcctcagcatggtccaca

SEQ ID NO: 8216 - DNA, 20 bp, Artificial Sequence
  Description of Artificial Sequence: Synthetic oligonucleotide
  Target: ANGPTL4; (-) strand; PAM type: NRG; PAM sequence: AAG
ccttcctcagcatggtccac

SEQ ID NO: 8217 - DNA, 20 bp, Artificial Sequence
  Description of Artificial Sequence: Synthetic oligonucleotide
  Target: ANGPTL4; (-) strand; PAM type: NRG; PAM sequence: TGG
ccctatgtccttcctcagca

SEQ ID NO: 8218 - DNA, 20 bp, Artificial Sequence
  Description of Artificial Sequence: Synthetic oligonucleotide
  Target: ANGPTL4; (-) strand; PAM type: NRG; PAM sequence: CAG
tggctccctatgtccttcct

SEQ ID NO: 8219 - DNA, 20 bp, Artificial Sequence
  Description of Artificial Sequence: Synthetic oligonucleotide
  Target: ANGPTL4; (-) strand; PAM type: NRG; PAM sequence: TGG
catctgcctaacctcttcca

SEQ ID NO: 8220 - DNA, 20 bp, Artificial Sequence
  Description of Artificial Sequence: Synthetic oligonucleotide
  Target: ANGPTL4; (-) strand; PAM type: NRG; PAM sequence: AGG
tggatgaccagggaagtaaa

SEQ ID NO: 8221 - DNA, 20 bp, Artificial Sequence
  Description of Artificial Sequence: Synthetic oligonucleotide
  Target: ANGPTL4; (-) strand; PAM type: NRG; PAM sequence: AAG
gtggatgaccagggaagtaa

SEQ ID NO: 8222 - DNA, 20 bp, Artificial Sequence
  Description of Artificial Sequence: Synthetic oligonucleotide
  Target: ANGPTL4; (-) strand; PAM type: NRG; PAM sequence: AAG
ttaacagtggatgaccaggg

SEQ ID NO: 8223 - DNA, 20 bp, Artificial Sequence
  Description of Artificial Sequence: Synthetic oligonucleotide
  Target: ANGPTL4; (-) strand; PAM type: NRG; PAM sequence: GGG
ggcttaacagtggatgacca

SEQ ID NO: 8224 - DNA, 20 bp, Artificial Sequence
  Description of Artificial Sequence: Synthetic oligonucleotide
  Target: ANGPTL4; (-) strand; PAM type: NRG; PAM sequence: AGG
gggcttaacagtggatgacc

SEQ ID NO: 8225 - DNA, 20 bp, Artificial Sequence
  Description of Artificial Sequence: Synthetic oligonucleotide
  Target: ANGPTL4; (-) strand; PAM type: NRG; PAM sequence: CAG
ggggcttaacagtggatgac

SEQ ID NO: 8226 - DNA, 20 bp, Artificial Sequence
  Description of Artificial Sequence: Synthetic oligonucleotide
  Target: ANGPTL4; (-) strand; PAM type: NRG; PAM sequence: TGG
catatctgggggcttaacag

SEQ ID NO: 8227 - DNA, 20 bp, Artificial Sequence
  Description of Artificial Sequence: Synthetic oligonucleotide
  Target: ANGPTL4; (-) strand; PAM type: NRG; PAM sequence: CAG
aggcatatctgggggcttaa

SEQ ID NO: 8228 - DNA, 20 bp, Artificial Sequence
  Description of Artificial Sequence: Synthetic oligonucleotide
  Target: ANGPTL4; (-) strand; PAM type: NRG; PAM sequence: GGG
caggagccaggcatatctgg

SEQ ID NO: 8229 - DNA, 20 bp, Artificial Sequence
  Description of Artificial Sequence: Synthetic oligonucleotide
  Target: ANGPTL4; (-) strand; PAM type: NRG; PAM sequence: GGG
tcaggagccaggcatatctg

SEQ ID NO: 8230 - DNA, 20 bp, Artificial Sequence
  Description of Artificial Sequence: Synthetic oligonucleotide
  Target: ANGPTL4; (-) strand; PAM type: NRG; PAM sequence: GGG
ctcaggagccaggcatatct

SEQ ID NO: 8231 - DNA, 20 bp, Artificial Sequence
  Description of Artificial Sequence: Synthetic oligonucleotide
  Target: ANGPTL4; (-) strand; PAM type: NRG; PAM sequence: TGG
tctcaggagccaggcatatc

SEQ ID NO: 8232 - DNA, 20 bp, Artificial Sequence
  Description of Artificial Sequence: Synthetic oligonucleotide
  Target: ANGPTL4; (-) strand; PAM type: NRG; PAM sequence: AGG
tggggggggtctcaggagcc

SEQ ID NO: 8233 - DNA, 20 bp, Artificial Sequence
  Description of Artificial Sequence: Synthetic oligonucleotide
  Target: ANGPTL4; (-) strand; PAM type: NRG; PAM sequence: CAG
ctggggggggtctcaggagc

SEQ ID NO: 8234 - DNA, 20 bp, Artificial Sequence
  Description of Artificial Sequence: Synthetic oligonucleotide
  Target: ANGPTL4; (-) strand; PAM type: NRG; PAM sequence: GAG
gcccctggggggggtctcag

SEQ ID NO: 8235 - DNA, 20 bp, Artificial Sequence
  Description of Artificial Sequence: Synthetic oligonucleotide
  Target: ANGPTL4; (-) strand; PAM type: NRG; PAM sequence: AGG
cagcccctggggggggtctc

SEQ ID NO: 8236 - DNA, 20 bp, Artificial Sequence
  Description of Artificial Sequence: Synthetic oligonucleotide
  Target: ANGPTL4; (-) strand; PAM type: NRG; PAM sequence: CAG
gcagcccctggggggggtct

SEQ ID NO: 8237 - DNA, 20 bp, Artificial Sequence
  Description of Artificial Sequence: Synthetic oligonucleotide
  Target: ANGPTL4; (-) strand; PAM type: NRG; PAM sequence: GGG
aggagggcagcccctggggg

SEQ ID NO: 8238 - DNA, 20 bp, Artificial Sequence
  Description of Artificial Sequence: Synthetic oligonucleotide
  Target: ANGPTL4; (-) strand; PAM type: NRG; PAM sequence: GGG
caggagggcagcccctgggg

SEQ ID NO: 8239 - DNA, 20 bp, Artificial Sequence
  Description of Artificial Sequence: Synthetic oligonucleotide
  Target: ANGPTL4; (-) strand; PAM type: NRG; PAM sequence: GGG
acaggagggcagcccctggg

SEQ ID NO: 8240 - DNA, 20 bp, Artificial Sequence
  Description of Artificial Sequence: Synthetic oligonucleotide
  Target: ANGPTL4; (-) strand; PAM type: NRG; PAM sequence: GGG
aacaggagggcagcccctgg

SEQ ID NO: 8241 - DNA, 20 bp, Artificial Sequence
  Description of Artificial Sequence: Synthetic oligonucleotide
  Target: ANGPTL4; (-) strand; PAM type: NRG; PAM sequence: GGG
aaacaggagggcagcccctg

SEQ ID NO: 8242 - DNA, 20 bp, Artificial Sequence
  Description of Artificial Sequence: Synthetic oligonucleotide
  Target: ANGPTL4; (-) strand; PAM type: NRG; PAM sequence: GGG
gaaacaggagggcagcccct

SEQ ID NO: 8243 - DNA, 20 bp, Artificial Sequence
  Description of Artificial Sequence: Synthetic oligonucleotide
  Target: ANGPTL4; (-) strand; PAM type: NRG; PAM sequence: TGG
tgaaacaggagggcagcccc

SEQ ID NO: 8244 - DNA, 20 bp, Artificial Sequence
  Description of Artificial Sequence: Synthetic oligonucleotide
  Target: ANGPTL4; (-) strand; PAM type: NRG; PAM sequence: CAG
ggagacttgaaacaggaggg

SEQ ID NO: 8245 - DNA, 20 bp, Artificial Sequence
  Description of Artificial Sequence: Synthetic oligonucleotide
  Target: ANGPTL4; (-) strand; PAM type: NRG; PAM sequence: GGG
agtggagacttgaaacagga

SEQ ID NO: 8246 - DNA, 20 bp, Artificial Sequence
  Description of Artificial Sequence: Synthetic oligonucleotide
  Target: ANGPTL4; (-) strand; PAM type: NRG; PAM sequence: AGG
aagtggagacttgaaacagg

SEQ ID NO: 8247 - DNA, 20 bp, Artificial Sequence
  Description of Artificial Sequence: Synthetic oligonucleotide
  Target: ANGPTL4; (-) strand; PAM type: NRG; PAM sequence: GAG
aaagtggagacttgaaacag

SEQ ID NO: 8248 - DNA, 20 bp, Artificial Sequence
  Description of Artificial Sequence: Synthetic oligonucleotide
  Target: ANGPTL4; (-) strand; PAM type: NRG; PAM sequence: AGG
ataaagtggagacttgaaac

SEQ ID NO: 8249 - DNA, 20 bp, Artificial Sequence
  Description of Artificial Sequence: Synthetic oligonucleotide
  Target: ANGPTL4; (-) strand; PAM type: NRG; PAM sequence: CAG
gataaagtggagacttgaaa

SEQ ID NO: 8250 - DNA, 20 bp, Artificial Sequence
  Description of Artificial Sequence: Synthetic oligonucleotide
  Target: ANGPTL4; (-) strand; PAM type: NRG; PAM sequence: GAG
ccctgaagggagataaagtg

SEQ ID NO: 8251 - DNA, 20 bp, Artificial Sequence
  Description of Artificial Sequence: Synthetic oligonucleotide
  Target: ANGPTL4; (-) strand; PAM type: NRG; PAM sequence: TGG
agccctgaagggagataaag

SEQ ID NO: 8252 - DNA, 20 bp, Artificial Sequence
  Description of Artificial Sequence: Synthetic oligonucleotide
  Target: ANGPTL4; (-) strand; PAM type: NRG; PAM sequence: AAG
ggcagccctgaagggagata

SEQ ID NO: 8253 - DNA, 20 bp, Artificial Sequence
  Description of Artificial Sequence: Synthetic oligonucleotide
  Target: ANGPTL4; (-) strand; PAM type: NRG; PAM sequence: GAG
tccctgggcagccctgaagg

SEQ ID NO: 8254 - DNA, 20 bp, Artificial Sequence
  Description of Artificial Sequence: Synthetic oligonucleotide
  Target: ANGPTL4; (-) strand; PAM type: NRG; PAM sequence: GGG
aatccctgggcagccctgaa

SEQ ID NO: 8255 - DNA, 20 bp, Artificial Sequence
  Description of Artificial Sequence: Synthetic oligonucleotide
  Target: ANGPTL4; (-) strand; PAM type: NRG; PAM sequence: AGG
caatccctgggcagccctga

SEQ ID NO: 8256 - DNA, 20 bp, Artificial Sequence
  Description of Artificial Sequence: Synthetic oligonucleotide
  Target: ANGPTL4; (-) strand; PAM type: NRG; PAM sequence: AAG
gcaatccctgggcagccctg

SEQ ID NO: 8257 - DNA, 20 bp, Artificial Sequence
  Description of Artificial Sequence: Synthetic oligonucleotide
  Target: ANGPTL4; (-) strand; PAM type: NRG; PAM sequence: CAG
agctcctggcaatccctggg

SEQ ID NO: 8258 - DNA, 20 bp, Artificial Sequence
  Description of Artificial Sequence: Synthetic oligonucleotide
  Target: ANGPTL4; (-) strand; PAM type: NRG; PAM sequence: GGG
aacagctcctggcaatccct

SEQ ID NO: 8259 - DNA, 20 bp, Artificial Sequence
  Description of Artificial Sequence: Synthetic oligonucleotide
  Target: ANGPTL4; (-) strand; PAM type: NRG; PAM sequence: TGG
gaacagctcctggcaatccc

SEQ ID NO: 8260 - DNA, 20 bp, Artificial Sequence
  Description of Artificial Sequence: Synthetic oligonucleotide
  Target: ANGPTL4; (-) strand; PAM type: NRG; PAM sequence: TGG
ccccaacctggaacagctcc

SEQ ID NO: 8261 - DNA, 20 bp, Artificial Sequence
  Description of Artificial Sequence: Synthetic oligonucleotide
  Target: ANGPTL4; (-) strand; PAM type: NRG; PAM sequence: CAG
tgcctctccccaacctggaa

SEQ ID NO: 8262 - DNA, 20 bp, Artificial Sequence
  Description of Artificial Sequence: Synthetic oligonucleotide
  Target: ANGPTL4; (-) strand; PAM type: NRG; PAM sequence: TGG
cactctgcctctccccaacc

SEQ ID NO: 8263 - DNA, 20 bp, Artificial Sequence
  Description of Artificial Sequence: Synthetic oligonucleotide
  Target: ANGPTL4; (-) strand; PAM type: NRG; PAM sequence: TAG
ccctgaggctggatttcaaa

SEQ ID NO: 8264 - DNA, 20 bp, Artificial Sequence
  Description of Artificial Sequence: Synthetic oligonucleotide
  Target: ANGPTL4; (-) strand; PAM type: NRG; PAM sequence: TGG
atggcggagacccctgaggc

SEQ ID NO: 8265 - DNA, 20 bp, Artificial Sequence
  Description of Artificial Sequence: Synthetic oligonucleotide
  Target: ANGPTL4; (-) strand; PAM type: NRG; PAM sequence: AGG
aaaaatggcggagacccctg

SEQ ID NO: 8266 - DNA, 20 bp, Artificial Sequence
  Description of Artificial Sequence: Synthetic oligonucleotide
  Target: ANGPTL4; (-) strand; PAM type: NRG; PAM sequence: GAG
caaaaatggcggagacccct

SEQ ID NO: 8267 - DNA, 20 bp, Artificial Sequence
  Description of Artificial Sequence: Synthetic oligonucleotide
  Target: ANGPTL4; (-) strand; PAM type: NRG; PAM sequence: GAG
gcagttcaccaaaaatggcg

SEQ ID NO: 8268 - DNA, 20 bp, Artificial Sequence
  Description of Artificial Sequence: Synthetic oligonucleotide
  Target: ANGPTL4; (-) strand; PAM type: NRG; PAM sequence: CGG
ttgcagttcaccaaaaatgg

SEQ ID NO: 8269 - DNA, 20 bp, Artificial Sequence
  Description of Artificial Sequence: Synthetic oligonucleotide
  Target: ANGPTL4; (-) strand; PAM type: NRG; PAM sequence: TGG
atcttgcagttcaccaaaaa

SEQ ID NO: 8270 - DNA, 20 bp, Artificial Sequence
  Description of Artificial Sequence: Synthetic oligonucleotide
  Target: ANGPTL4; (-) strand; PAM type: NRG; PAM sequence: CAG
ccctacctgaggtcatcttg

SEQ ID NO: 8271 - DNA, 20 bp, Artificial Sequence
  Description of Artificial Sequence: Synthetic oligonucleotide
  Target: ANGPTL4; (-) strand; PAM type: NRG; PAM sequence: AGG
ggactaacacaccctacctg

SEQ ID NO: 8272 - DNA, 20 bp, Artificial Sequence
  Description of Artificial Sequence: Synthetic oligonucleotide
  Target: ANGPTL4; (-) strand; PAM type: NRG; PAM sequence: GAG
tggactaacacaccctacct

SEQ ID NO: 8273 - DNA, 20 bp, Artificial Sequence
  Description of Artificial Sequence: Synthetic oligonucleotide
  Target: ANGPTL4; (-) strand; PAM type: NRG; PAM sequence: TGG
atggggagaggggcccctgg

SEQ ID NO: 8274 - DNA, 20 bp, Artificial Sequence
  Description of Artificial Sequence: Synthetic oligonucleotide
  Target: ANGPTL4; (-) strand; PAM type: NRG; PAM sequence: TGG
cctatggggagaggggcccc

SEQ ID NO: 8275 - DNA, 20 bp, Artificial Sequence
  Description of Artificial Sequence: Synthetic oligonucleotide
  Target: ANGPTL4; (-) strand; PAM type: NRG; PAM sequence: GGG
aacagggcctatggggagag

SEQ ID NO: 8276 - DNA, 20 bp, Artificial Sequence
  Description of Artificial Sequence: Synthetic oligonucleotide
  Target: ANGPTL4; (-) strand; PAM type: NRG; PAM sequence: GGG
caacagggcctatggggaga

SEQ ID NO: 8277 - DNA, 20 bp, Artificial Sequence
  Description of Artificial Sequence: Synthetic oligonucleotide
  Target: ANGPTL4; (-) strand; PAM type: NRG; PAM sequence: AGG
acaacagggcctatggggag

SEQ ID NO: 8278 - DNA, 20 bp, Artificial Sequence
  Description of Artificial Sequence: Synthetic oligonucleotide
  Target: ANGPTL4; (-) strand; PAM type: NRG; PAM sequence: GAG
gacaacagggcctatgggga

SEQ ID NO: 8279 - DNA, 20 bp, Artificial Sequence
  Description of Artificial Sequence: Synthetic oligonucleotide
  Target: ANGPTL4; (-) strand; PAM type: NRG; PAM sequence: GAG
aagacaacagggcctatggg

SEQ ID NO: 8280 - DNA, 20 bp, Artificial Sequence
  Description of Artificial Sequence: Synthetic oligonucleotide
  Target: ANGPTL4; (-) strand; PAM type: NRG; PAM sequence: GGG
gaaagacaacagggcctatg

SEQ ID NO: 8281 - DNA, 20 bp, Artificial Sequence
  Description of Artificial Sequence: Synthetic oligonucleotide
  Target: ANGPTL4; (-) strand; PAM type: NRG; PAM sequence: GGG
agaaagacaacagggcctat

SEQ ID NO: 8282 - DNA, 20 bp, Artificial Sequence
  Description of Artificial Sequence: Synthetic oligonucleotide
  Target: ANGPTL4; (-) strand; PAM type: NRG; PAM sequence: TGG
aagaaagacaacagggccta

SEQ ID NO: 8283 - DNA, 20 bp, Artificial Sequence
  Description of Artificial Sequence: Synthetic oligonucleotide
  Target: ANGPTL4; (-) strand; PAM type: NRG; PAM sequence: GGG
caatttaaagaaagacaaca

SEQ ID NO: 8284 - DNA, 20 bp, Artificial Sequence
  Description of Artificial Sequence: Synthetic oligonucleotide
  Target: ANGPTL4; (-) strand; PAM type: NRG; PAM sequence: AGG
tcaatttaaagaaagacaac

SEQ ID NO: 8285 - DNA, 20 bp, Artificial Sequence
  Description of Artificial Sequence: Synthetic oligonucleotide
  Target: ANGPTL4; (-) strand; PAM type: NRG; PAM sequence: CAG
ttcaatttaaagaaagacaa

SEQ ID NO: 8286 - DNA, 20 bp, Artificial Sequence
  Description of Artificial Sequence: Synthetic oligonucleotide
  Target: ANGPTL4; (-) strand; PAM type: NRG; PAM sequence: AAG
ttttgttttcaatttaaaga

SEQ ID NO: 8287 - DNA, 20 bp, Artificial Sequence
  Description of Artificial Sequence: Synthetic oligonucleotide
  Target: ANGPTL4; (-) strand; PAM type: NRG; PAM sequence: AAG
tttgttttgttttcaattta

SEQ ID NO: 8288 - DNA, 20 bp, Artificial Sequence
  Description of Artificial Sequence: Synthetic oligonucleotide
  Target: ANGPTL4; (-) strand; PAM type: NRG; PAM sequence: AAG
accagcttgggcaacatagc

SEQ ID NO: 8289 - DNA, 20 bp, Artificial Sequence
  Description of Artificial Sequence: Synthetic oligonucleotide
  Target: ANGPTL4; (-) strand; PAM type: NRG; PAM sequence: TAG
aaagaccagcttgggcaaca

SEQ ID NO: 8290 - DNA, 20 bp, Artificial Sequence
  Description of Artificial Sequence: Synthetic oligonucleotide
  Target: ANGPTL4; (-) strand; PAM type: NRG; PAM sequence: GGG
aaaaaaaaaaagaccagctt

SEQ ID NO: 8291 - DNA, 20 bp, Artificial Sequence
  Description of Artificial Sequence: Synthetic oligonucleotide
  Target: ANGPTL4; (-) strand; PAM type: NRG; PAM sequence: TGG
aaaaaaaaaaaagaccagct

SEQ ID NO: 8292 - DNA, 20 bp, Artificial Sequence
  Description of Artificial Sequence: Synthetic oligonucleotide
  Target: ANGPTL4; (-) strand; PAM type: NRG; PAM sequence: CAG
aaaaaaaaaaaaaaaaagac

SEQ ID NO: 8293 - DNA, 20 bp, Artificial Sequence
  Description of Artificial Sequence: Synthetic oligonucleotide
  Target: ANGPTL4; (-) strand; PAM type: NRG; PAM sequence: AAG
caaaaaaaaaaaaaaaaaaa

SEQ ID NO: 8294 - DNA, 20 bp, Artificial Sequence
  Description of Artificial Sequence: Synthetic oligonucleotide
  Target: ANGPTL4; (-) strand; PAM type: NRG; PAM sequence: GAG
gcattgcactccagctccaa

SEQ ID NO: 8295 - DNA, 20 bp, Artificial Sequence
  Description of Artificial Sequence: Synthetic oligonucleotide
  Target: ANGPTL4; (-) strand; PAM type: NRG; PAM sequence: AAG
tggcattgcactccagctcc

SEQ ID NO: 8296 - DNA, 20 bp, Artificial Sequence
  Description of Artificial Sequence: Synthetic oligonucleotide
  Target: ANGPTL4; (-) strand; PAM type: NRG; PAM sequence: CAG
gagatcgtggcattgcactc

SEQ ID NO: 8297 - DNA, 20 bp, Artificial Sequence
  Description of Artificial Sequence: Synthetic oligonucleotide
  Target: ANGPTL4; (-) strand; PAM type: NRG; PAM sequence: TGG
gtttcagtgagctgagatcg

SEQ ID NO: 8298 - DNA, 20 bp, Artificial Sequence
  Description of Artificial Sequence: Synthetic oligonucleotide
  Target: ANGPTL4; (-) strand; PAM type: NRG; PAM sequence: GAG
ggcggaggtttcagtgagct

SEQ ID NO: 8299 - DNA, 20 bp, Artificial Sequence
  Description of Artificial Sequence: Synthetic oligonucleotide
  Target: ANGPTL4; (-) strand; PAM type: NRG; PAM sequence: GAG
cgggaggcggaggtttcagt

SEQ ID NO: 8300 - DNA, 20 bp, Artificial Sequence
  Description of Artificial Sequence: Synthetic oligonucleotide
  Target: ANGPTL4; (-) strand; PAM type: NRG; PAM sequence: CAG
aacccgggaggcggaggttt

SEQ ID NO: 8301 - DNA, 20 bp, Artificial Sequence
  Description of Artificial Sequence: Synthetic oligonucleotide
  Target: ANGPTL4; (-) strand; PAM type: NRG; PAM sequence: AGG
tgcttgaacccgggaggcgg

SEQ ID NO: 8302 - DNA, 20 bp, Artificial Sequence
  Description of Artificial Sequence: Synthetic oligonucleotide
  Target: ANGPTL4; (-) strand; PAM type: NRG; PAM sequence: GAG
ttgcttgaacccgggaggcg

SEQ ID NO: 8303 - DNA, 20 bp, Artificial Sequence
  Description of Artificial Sequence: Synthetic oligonucleotide
  Target: ANGPTL4; (-) strand; PAM type: NRG; PAM sequence: CGG
aattgcttgaacccgggagg

SEQ ID NO: 8304 - DNA, 20 bp, Artificial Sequence
  Description of Artificial Sequence: Synthetic oligonucleotide
  Target: ANGPTL4; (-) strand; PAM type: NRG; PAM sequence: AGG
gagaattgcttgaacccggg

SEQ ID NO: 8305 - DNA, 20 bp, Artificial Sequence
  Description of Artificial Sequence: Synthetic oligonucleotide
  Target: ANGPTL4; (-) strand; PAM type: NRG; PAM sequence: GAG
ggagaattgcttgaacccgg

SEQ ID NO: 8306 - DNA, 20 bp, Artificial Sequence
  Description of Artificial Sequence: Synthetic oligonucleotide
  Target: ANGPTL4; (-) strand; PAM type: NRG; PAM sequence: GGG
ctggagaattgcttgaaccc

SEQ ID NO: 8307 - DNA, 20 bp, Artificial Sequence
  Description of Artificial Sequence: Synthetic oligonucleotide
  Target: ANGPTL4; (-) strand; PAM type: NRG; PAM sequence: CGG
gctggagaattgcttgaacc

SEQ ID NO: 8308 - DNA, 20 bp, Artificial Sequence
  Description of Artificial Sequence: Synthetic oligonucleotide
  Target: ANGPTL4; (-) strand; PAM type: NRG; PAM sequence: GAG
tactggggaggctgacgctg

SEQ ID NO: 8309 - DNA, 20 bp, Artificial Sequence
  Description of Artificial Sequence: Synthetic oligonucleotide
  Target: ANGPTL4; (-) strand; PAM type: NRG; PAM sequence: TGG
gctactggggaggctgacgc

SEQ ID NO: 8310 - DNA, 20 bp, Artificial Sequence
  Description of Artificial Sequence: Synthetic oligonucleotide
  Target: ANGPTL4; (-) strand; PAM type: NRG; PAM sequence: AGG
tgtagtctcagctactgggg

SEQ ID NO: 8311 - DNA, 20 bp, Artificial Sequence
  Description of Artificial Sequence: Synthetic oligonucleotide
  Target: ANGPTL4; (-) strand; PAM type: NRG; PAM sequence: GAG
ctgtagtctcagctactggg

SEQ ID NO: 8312 - DNA, 20 bp, Artificial Sequence
  Description of Artificial Sequence: Synthetic oligonucleotide
  Target: ANGPTL4; (-) strand; PAM type: NRG; PAM sequence: GGG
acctgtagtctcagctactg

SEQ ID NO: 8313 - DNA, 20 bp, Artificial Sequence
  Description of Artificial Sequence: Synthetic oligonucleotide
  Target: ANGPTL4; (-) strand; PAM type: NRG; PAM sequence: GGG
cacctgtagtctcagctact

SEQ ID NO: 8314 - DNA, 20 bp, Artificial Sequence
  Description of Artificial Sequence: Synthetic oligonucleotide
  Target: ANGPTL4; (-) strand; PAM type: NRG; PAM sequence: TGG
gcacctgtagtctcagctac

SEQ ID NO: 8315 - DNA, 20 bp, Artificial Sequence
  Description of Artificial Sequence: Synthetic oligonucleotide
  Target: ANGPTL4; (-) strand; PAM type: NRG; PAM sequence: CAG
gttgctcgcacctgtagtct

SEQ ID NO: 8316 - DNA, 20 bp, Artificial Sequence
  Description of Artificial Sequence: Synthetic oligonucleotide
  Target: ANGPTL4; (-) strand; PAM type: NRG; PAM sequence: TAG
ggtgtggttgctcgcacctg

SEQ ID NO: 8317 - DNA, 20 bp, Artificial Sequence
  Description of Artificial Sequence: Synthetic oligonucleotide
  Target: ANGPTL4; (-) strand; PAM type: NRG; PAM sequence: TGG
atacaaaaattagctgggtg

SEQ ID NO: 8318 - DNA, 20 bp, Artificial Sequence
  Description of Artificial Sequence: Synthetic oligonucleotide
  Target: ANGPTL4; (-) strand; PAM type: NRG; PAM sequence: GGG
taaaaatacaaaaattagct

SEQ ID NO: 8319 - DNA, 20 bp, Artificial Sequence
  Description of Artificial Sequence: Synthetic oligonucleotide
  Target: ANGPTL4; (-) strand; PAM type: NRG; PAM sequence: TGG
ctaaaaatacaaaaattagc

SEQ ID NO: 8320 - DNA, 20 bp, Artificial Sequence
  Description of Artificial Sequence: Synthetic oligonucleotide
  Target: ANGPTL4; (-) strand; PAM type: NRG; PAM sequence: TAG
tctactaaaaatacaaaaat

SEQ ID NO: 8321 - DNA, 20 bp, Artificial Sequence
  Description of Artificial Sequence: Synthetic oligonucleotide
  Target: ANGPTL4; (-) strand; PAM type: NRG; PAM sequence: CAG
cagaccaacatggtgaaacc

SEQ ID NO: 8322 - DNA, 20 bp, Artificial Sequence
  Description of Artificial Sequence: Synthetic oligonucleotide
  Target: ANGPTL4; (-) strand; PAM type: NRG; PAM sequence: TGG
tgagaccagccagaccaaca

SEQ ID NO: 8323 - DNA, 20 bp, Artificial Sequence
  Description of Artificial Sequence: Synthetic oligonucleotide
  Target: ANGPTL4; (-) strand; PAM type: NRG; PAM sequence: CAG
gtcaggagtttgagaccagc

SEQ ID NO: 8324 - DNA, 20 bp, Artificial Sequence
  Description of Artificial Sequence: Synthetic oligonucleotide
  Target: ANGPTL4; (-) strand; PAM type: NRG; PAM sequence: CAG
tgaggtcaggagtttgagac

SEQ ID NO: 8325 - DNA, 20 bp, Artificial Sequence
  Description of Artificial Sequence: Synthetic oligonucleotide
  Target: ANGPTL4; (-) strand; PAM type: NRG; PAM sequence: GAG
tcatttgaggtcaggagttt

SEQ ID NO: 8326 - DNA, 20 bp, Artificial Sequence
  Description of Artificial Sequence: Synthetic oligonucleotide
  Target: ANGPTL4; (-) strand; PAM type: NRG; PAM sequence: GAG
ggcaaatcatttgaggtcag

SEQ ID NO: 8327 - DNA, 20 bp, Artificial Sequence
  Description of Artificial Sequence: Synthetic oligonucleotide
  Target: ANGPTL4; (-) strand; PAM type: NRG; PAM sequence: AGG
tcggcaaatcatttgaggtc

SEQ ID NO: 8328 - DNA, 20 bp, Artificial Sequence
  Description of Artificial Sequence: Synthetic oligonucleotide
  Target: ANGPTL4; (-) strand; PAM type: NRG; PAM sequence: CAG
gtcggcaaatcatttgaggt

SEQ ID NO: 8329 - DNA, 20 bp, Artificial Sequence
  Description of Artificial Sequence: Synthetic oligonucleotide
  Target: ANGPTL4; (-) strand; PAM type: NRG; PAM sequence: AGG
caaagtcggcaaatcatttg

SEQ ID NO: 8330 - DNA, 20 bp, Artificial Sequence
  Description of Artificial Sequence: Synthetic oligonucleotide
  Target: ANGPTL4; (-) strand; PAM type: NRG; PAM sequence: GAG
ccaaagtcggcaaatcattt

SEQ ID NO: 8331 - DNA, 20 bp, Artificial Sequence
  Description of Artificial Sequence: Synthetic oligonucleotide
  Target: ANGPTL4; (-) strand; PAM type: NRG; PAM sequence: CGG
gcattttgggaggccaaagt

SEQ ID NO: 8332 - DNA, 20 bp, Artificial Sequence
  Description of Artificial Sequence: Synthetic oligonucleotide
  Target: ANGPTL4; (-) strand; PAM type: NRG; PAM sequence: AAG
cccagcattttgggaggcca

SEQ ID NO: 8333 - DNA, 20 bp, Artificial Sequence
  Description of Artificial Sequence: Synthetic oligonucleotide
  Target: ANGPTL4; (-) strand; PAM type: NRG; PAM sequence: AGG
tataatcccagcattttggg

SEQ ID NO: 8334 - DNA, 20 bp, Artificial Sequence
  Description of Artificial Sequence: Synthetic oligonucleotide
  Target: ANGPTL4; (-) strand; PAM type: NRG; PAM sequence: GAG
ctataatcccagcattttgg

SEQ ID NO: 8335 - DNA, 20 bp, Artificial Sequence
  Description of Artificial Sequence: Synthetic oligonucleotide
  Target: ANGPTL4; (-) strand; PAM type: NRG; PAM sequence: GGG
gcctataatcccagcatttt

SEQ ID NO: 8336 - DNA, 20 bp, Artificial Sequence
  Description of Artificial Sequence: Synthetic oligonucleotide
  Target: ANGPTL4; (-) strand; PAM type: NRG; PAM sequence: TGG
tgcctataatcccagcattt

SEQ ID NO: 8337 - DNA, 20 bp, Artificial Sequence
  Description of Artificial Sequence: Synthetic oligonucleotide
  Target: ANGPTL4; (-) strand; PAM type: NRG; PAM sequence: CAG
gtggctaatgcctataatcc

SEQ ID NO: 8338 - DNA, 20 bp, Artificial Sequence
  Description of Artificial Sequence: Synthetic oligonucleotide
  Target: ANGPTL4; (-) strand; PAM type: NRG; PAM sequence: TGG
agaaaagaggccaggagcag

SEQ ID NO: 8339 - DNA, 20 bp, Artificial Sequence
  Description of Artificial Sequence: Synthetic oligonucleotide
  Target: ANGPTL4; (-) strand; PAM type: NRG; PAM sequence: CAG
taaagaaaagaggccaggag

SEQ ID NO: 8340 - DNA, 20 bp, Artificial Sequence
  Description of Artificial Sequence: Synthetic oligonucleotide
  Target: ANGPTL4; (-) strand; PAM type: NRG; PAM sequence: GAG
ttttaaagaaaagaggccag

SEQ ID NO: 8341 - DNA, 20 bp, Artificial Sequence
  Description of Artificial Sequence: Synthetic oligonucleotide
  Target: ANGPTL4; (-) strand; PAM type: NRG; PAM sequence: AGG
cattttaaagaaaagaggcc

SEQ ID NO: 8342 - DNA, 20 bp, Artificial Sequence
  Description of Artificial Sequence: Synthetic oligonucleotide
  Target: ANGPTL4; (-) strand; PAM type: NRG; PAM sequence: CAG
gcattttaaagaaaagaggc

SEQ ID NO: 8343 - DNA, 20 bp, Artificial Sequence
  Description of Artificial Sequence: Synthetic oligonucleotide
  Target: ANGPTL4; (-) strand; PAM type: NRG; PAM sequence: AGG
ggctgcattttaaagaaaag

SEQ ID NO: 8344 - DNA, 20 bp, Artificial Sequence
  Description of Artificial Sequence: Synthetic oligonucleotide
  Target: ANGPTL4; (-) strand; PAM type: NRG; PAM sequence: GAG
gggctgcattttaaagaaaa

SEQ ID NO: 8345 - DNA, 20 bp, Artificial Sequence
  Description of Artificial Sequence: Synthetic oligonucleotide
  Target: ANGPTL4; (-) strand; PAM type: NRG; PAM sequence: AAG
aagggctgcattttaaagaa

SEQ ID NO: 8346 - DNA, 20 bp, Artificial Sequence
  Description of Artificial Sequence: Synthetic oligonucleotide
  Target: ANGPTL4; (-) strand; PAM type: NRG; PAM sequence: AAG
cagacaagggctgcatttta

SEQ ID NO: 8347 - DNA, 20 bp, Artificial Sequence
  Description of Artificial Sequence: Synthetic oligonucleotide
  Target: ANGPTL4; (-) strand; PAM type: NRG; PAM sequence: GGG
gagccactacacccagacaa

SEQ ID NO: 8348 - DNA, 20 bp, Artificial Sequence
  Description of Artificial Sequence: Synthetic oligonucleotide
  Target: ANGPTL4; (-) strand; PAM type: NRG; PAM sequence: AGG
tgagccactacacccagaca

SEQ ID NO: 8349 - DNA, 20 bp, Artificial Sequence
  Description of Artificial Sequence: Synthetic oligonucleotide
  Target: ANGPTL4; (-) strand; PAM type: NRG; PAM sequence: AAG
atgagccactacacccagac

SEQ ID NO: 8350 - DNA, 20 bp, Artificial Sequence
  Description of Artificial Sequence: Synthetic oligonucleotide
  Target: ANGPTL4; (-) strand; PAM type: NRG; PAM sequence: CAG
cagatatgagccactacacc

SEQ ID NO: 8351 - DNA, 20 bp, Artificial Sequence
  Description of Artificial Sequence: Synthetic oligonucleotide
  Target: ANGPTL4; (-) strand; PAM type: NRG; PAM sequence: GAG
agtgtcgggattacagatat

SEQ ID NO: 8352 - DNA, 20 bp, Artificial Sequence
  Description of Artificial Sequence: Synthetic oligonucleotide
  Target: ANGPTL4; (-) strand; PAM type: NRG; PAM sequence: CAG
ctcccaaagtgtcgggatta

SEQ ID NO: 8353 - DNA, 20 bp, Artificial Sequence
  Description of Artificial Sequence: Synthetic oligonucleotide
  Target: ANGPTL4; (-) strand; PAM type: NRG; PAM sequence: GGG
gataggcctcccaaagtgtc

SEQ ID NO: 8354 - DNA, 20 bp, Artificial Sequence
  Description of Artificial Sequence: Synthetic oligonucleotide
  Target: ANGPTL4; (-) strand; PAM type: NRG; PAM sequence: CGG
tgataggcctcccaaagtgt

SEQ ID NO: 8355 - DNA, 20 bp, Artificial Sequence
  Description of Artificial Sequence: Synthetic oligonucleotide
  Target: ANGPTL4; (-) strand; PAM type: NRG; PAM sequence: AAG
tcctcatgataggcctccca

SEQ ID NO: 8356 - DNA, 20 bp, Artificial Sequence
  Description of Artificial Sequence: Synthetic oligonucleotide
  Target: ANGPTL4; (-) strand; PAM type: NRG; PAM sequence: AGG
gctcaagtgatcctcatgat

SEQ ID NO: 8357 - DNA, 20 bp, Artificial Sequence
  Description of Artificial Sequence: Synthetic oligonucleotide
  Target: ANGPTL4; (-) strand; PAM type: NRG; PAM sequence: TAG
ggctcaagtgatcctcatga

SEQ ID NO: 8358 - DNA, 20 bp, Artificial Sequence
  Description of Artificial Sequence: Synthetic oligonucleotide
  Target: ANGPTL4; (-) strand; PAM type: NRG; PAM sequence: AAG
ggtctcgaacttctgggctc

SEQ ID NO: 8359 - DNA, 20 bp, Artificial Sequence
  Description of Artificial Sequence: Synthetic oligonucleotide
  Target: ANGPTL4; (-) strand; PAM type: NRG; PAM sequence: GGG
caggctggtctcgaacttct

SEQ ID NO: 8360 - DNA, 20 bp, Artificial Sequence
  Description of Artificial Sequence: Synthetic oligonucleotide
  Target: ANGPTL4; (-) strand; PAM type: NRG; PAM sequence: TGG
ccaggctggtctcgaacttc

SEQ ID NO: 8361 - DNA, 20 bp, Artificial Sequence
  Description of Artificial Sequence: Synthetic oligonucleotide
  Target: ANGPTL4; (-) strand; PAM type: NRG; PAM sequence: TGG
tctcactatgttgtccaggc

SEQ ID NO: 8362 - DNA, 20 bp, Artificial Sequence
  Description of Artificial Sequence: Synthetic oligonucleotide
  Target: ANGPTL4; (-) strand; PAM type: NRG; PAM sequence: AGG
gagctctcactatgttgtcc

SEQ ID NO: 8363 - DNA, 20 bp, Artificial Sequence
  Description of Artificial Sequence: Synthetic oligonucleotide
  Target: ANGPTL4; (-) strand; PAM type: NRG; PAM sequence: CAG
tgagctctcactatgttgtc

SEQ ID NO: 8364 - DNA, 20 bp, Artificial Sequence
  Description of Artificial Sequence: Synthetic oligonucleotide
  Target: ANGPTL4; (-) strand; PAM type: NRG; PAM sequence: GAG
acaaaattttttgtaaagat

SEQ ID NO: 8365 - DNA, 20 bp, Artificial Sequence
  Description of Artificial Sequence: Synthetic oligonucleotide
  Target: ANGPTL4; (-) strand; PAM type: NRG; PAM sequence: AAG
cttttacaaaattttttgta

SEQ ID NO: 8366 - DNA, 20 bp, Artificial Sequence
  Description of Artificial Sequence: Synthetic oligonucleotide
  Target: ANGPTL4; (-) strand; PAM type: NRG; PAM sequence: TGG
caggtgtgagccactgcact

SEQ ID NO: 8367 - DNA, 20 bp, Artificial Sequence
  Description of Artificial Sequence: Synthetic oligonucleotide
  Target: ANGPTL4; (-) strand; PAM type: NRG; PAM sequence: GAG
agtgctgggattacaggtgt

SEQ ID NO: 8368 - DNA, 20 bp, Artificial Sequence
  Description of Artificial Sequence: Synthetic oligonucleotide
  Target: ANGPTL4; (-) strand; PAM type: NRG; PAM sequence: AGG
tcccaaagtgctgggattac

SEQ ID NO: 8369 - DNA, 20 bp, Artificial Sequence
  Description of Artificial Sequence: Synthetic oligonucleotide
  Target: ANGPTL4; (-) strand; PAM type: NRG; PAM sequence: CAG
ctcccaaagtgctgggatta

SEQ ID NO: 8370 - DNA, 20 bp, Artificial Sequence
  Description of Artificial Sequence: Synthetic oligonucleotide
  Target: ANGPTL4; (-) strand; PAM type: NRG; PAM sequence: GGG
cctcaacctcccaaagtgct

SEQ ID NO: 8371 - DNA, 20 bp, Artificial Sequence
  Description of Artificial Sequence: Synthetic oligonucleotide
  Target: ANGPTL4; (-) strand; PAM type: NRG; PAM sequence: TGG
gcctcaacctcccaaagtgc

SEQ ID NO: 8372 - DNA, 20 bp, Artificial Sequence
  Description of Artificial Sequence: Synthetic oligonucleotide
  Target: ANGPTL4; (-) strand; PAM type: NRG; PAM sequence: AAG
ctgtctgcctcaacctccca

SEQ ID NO: 8373 - DNA, 20 bp, Artificial Sequence
  Description of Artificial Sequence: Synthetic oligonucleotide
  Target: ANGPTL4; (-) strand; PAM type: NRG; PAM sequence: TGG
tttcaccatgttggtcaggc

SEQ ID NO: 8374 - DNA, 20 bp, Artificial Sequence
  Description of Artificial Sequence: Synthetic oligonucleotide
  Target: ANGPTL4; (-) strand; PAM type: NRG; PAM sequence: AGG
ggggtttcaccatgttggtc

SEQ ID NO: 8375 - DNA, 20 bp, Artificial Sequence
  Description of Artificial Sequence: Synthetic oligonucleotide
  Target: ANGPTL4; (-) strand; PAM type: NRG; PAM sequence: CAG
cggggtttcaccatgttggt

SEQ ID NO: 8376 - DNA, 20 bp, Artificial Sequence
  Description of Artificial Sequence: Synthetic oligonucleotide
  Target: ANGPTL4; (-) strand; PAM type: NRG; PAM sequence: TGG
gagacggggtttcaccatgt

SEQ ID NO: 8377 - DNA, 20 bp, Artificial Sequence
  Description of Artificial Sequence: Synthetic oligonucleotide
  Target: ANGPTL4; (-) strand; PAM type: NRG; PAM sequence: GGG
ttgtatttttagtagagacg

SEQ ID NO: 8378 - DNA, 20 bp, Artificial Sequence
  Description of Artificial Sequence: Synthetic oligonucleotide
  Target: ANGPTL4; (-) strand; PAM type: NRG; PAM sequence: GGG
tttgtatttttagtagagac

SEQ ID NO: 8379 - DNA, 20 bp, Artificial Sequence
  Description of Artificial Sequence: Synthetic oligonucleotide
  Target: ANGPTL4; (-) strand; PAM type: NRG; PAM sequence: CGG
ttttgtatttttagtagaga

SEQ ID NO: 8380 - DNA, 20 bp, Artificial Sequence
  Description of Artificial Sequence: Synthetic oligonucleotide
  Target: ANGPTL4; (-) strand; PAM type: NRG; PAM sequence: GAG
taatttttgtatttttagta

SEQ ID NO: 8381 - DNA, 20 bp, Artificial Sequence
  Description of Artificial Sequence: Synthetic oligonucleotide
  Target: ANGPTL4; (-) strand; PAM type: NRG; PAM sequence: TAG
gctaatttttgtatttttag

SEQ ID NO: 8382 - DNA, 20 bp, Artificial Sequence
  Description of Artificial Sequence: Synthetic oligonucleotide
  Target: ANGPTL4; (-) strand; PAM type: NRG; PAM sequence: TAG
ccggctaatttttgtatttt

SEQ ID NO: 8383 - DNA, 20 bp, Artificial Sequence
  Description of Artificial Sequence: Synthetic oligonucleotide
  Target: ANGPTL4; (-) strand; PAM type: NRG; PAM sequence: CGG
caggtgcacaccaccatgcc

SEQ ID NO: 8384 - DNA, 20 bp, Artificial Sequence
  Description of Artificial Sequence: Synthetic oligonucleotide
  Target: ANGPTL4; (-) strand; PAM type: NRG; PAM sequence: AGG
acctgagtagctgggattac

SEQ ID NO: 8385 - DNA, 20 bp, Artificial Sequence
  Description of Artificial Sequence: Synthetic oligonucleotide
  Target: ANGPTL4; (-) strand; PAM type: NRG; PAM sequence: CAG
cacctgagtagctgggatta

SEQ ID NO: 8386 - DNA, 20 bp, Artificial Sequence
  Description of Artificial Sequence: Synthetic oligonucleotide
  Target: ANGPTL4; (-) strand; PAM type: NRG; PAM sequence: GGG
cctcagccacctgagtagct

SEQ ID NO: 8387 - DNA, 20 bp, Artificial Sequence
  Description of Artificial Sequence: Synthetic oligonucleotide
  Target: ANGPTL4; (-) strand; PAM type: NRG; PAM sequence: TGG
gcctcagccacctgagtagc

SEQ ID NO: 8388 - DNA, 20 bp, Artificial Sequence
  Description of Artificial Sequence: Synthetic oligonucleotide
  Target: ANGPTL4; (-) strand; PAM type: NRG; PAM sequence: TAG
tcctgcctcagccacctgag

SEQ ID NO: 8389 - DNA, 20 bp, Artificial Sequence
  Description of Artificial Sequence: Synthetic oligonucleotide
  Target: ANGPTL4; (-) strand; PAM type: NRG; PAM sequence: GAG
ttctcctgcctcagccacct

SEQ ID NO: 8390 - DNA, 20 bp, Artificial Sequence
  Description of Artificial Sequence: Synthetic oligonucleotide
  Target: ANGPTL4; (-) strand; PAM type: NRG; PAM sequence: CAG
ttcaagagattctcctgcct

SEQ ID NO: 8391 - DNA, 20 bp, Artificial Sequence
  Description of Artificial Sequence: Synthetic oligonucleotide
  Target: ANGPTL4; (-) strand; PAM type: NRG; PAM sequence: GAG
cctctgcctcccaggttcaa

SEQ ID NO: 8392 - DNA, 20 bp, Artificial Sequence
  Description of Artificial Sequence: Synthetic oligonucleotide
  Target: ANGPTL4; (-) strand; PAM type: NRG; PAM sequence: AAG
aacctctgcctcccaggttc

SEQ ID NO: 8393 - DNA, 20 bp, Artificial Sequence
  Description of Artificial Sequence: Synthetic oligonucleotide
  Target: ANGPTL4; (-) strand; PAM type: NRG; PAM sequence: AGG
cactgcaacctctgcctccc

SEQ ID NO: 8394 - DNA, 20 bp, Artificial Sequence
  Description of Artificial Sequence: Synthetic oligonucleotide
  Target: ANGPTL4; (-) strand; PAM type: NRG; PAM sequence: CAG
tcactgcaacctctgcctcc

SEQ ID NO: 8395 - DNA, 20 bp, Artificial Sequence
  Description of Artificial Sequence: Synthetic oligonucleotide
  Target: ANGPTL4; (-) strand; PAM type: NRG; PAM sequence: CAG
ggagtgcggtggcgtcatct

SEQ ID NO: 8396 - DNA, 20 bp, Artificial Sequence
  Description of Artificial Sequence: Synthetic oligonucleotide
  Target: ANGPTL4; (-) strand; PAM type: NRG; PAM sequence: TGG
tcgcccaggctggagtgcgg

SEQ ID NO: 8397 - DNA, 20 bp, Artificial Sequence
  Description of Artificial Sequence: Synthetic oligonucleotide
  Target: ANGPTL4; (-) strand; PAM type: NRG; PAM sequence: CGG
ctgtcgcccaggctggagtg

SEQ ID NO: 8398 - DNA, 20 bp, Artificial Sequence
  Description of Artificial Sequence: Synthetic oligonucleotide
  Target: ANGPTL4; (-) strand; PAM type: NRG; PAM sequence: GAG
tcgctctgtcgcccaggctg

SEQ ID NO: 8399 - DNA, 20 bp, Artificial Sequence
  Description of Artificial Sequence: Synthetic oligonucleotide
  Target: ANGPTL4; (-) strand; PAM type: NRG; PAM sequence: TGG
tctcgctctgtcgcccaggc

SEQ ID NO: 8400 - DNA, 20 bp, Artificial Sequence
  Description of Artificial Sequence: Synthetic oligonucleotide
  Target: ANGPTL4; (-) strand; PAM type: NRG; PAM sequence: AGG
ggagtctcgctctgtcgccc

SEQ ID NO: 8401 - DNA, 20 bp, Artificial Sequence
  Description of Artificial Sequence: Synthetic oligonucleotide
  Target: ANGPTL4; (-) strand; PAM type: NRG; PAM sequence: CAG
cggagtctcgctctgtcgcc

SEQ ID NO: 8402 - DNA, 20 bp, Artificial Sequence
  Description of Artificial Sequence: Synthetic oligonucleotide
  Target: ANGPTL4; (-) strand; PAM type: NRG; PAM sequence: GAG
atttttttgatggggggacg

SEQ ID NO: 8403 - DNA, 20 bp, Artificial Sequence
  Description of Artificial Sequence: Synthetic oligonucleotide
  Target: ANGPTL4; (-) strand; PAM type: NRG; PAM sequence: CGG
ttatttttttgatgggggga

SEQ ID NO: 8404 - DNA, 20 bp, Artificial Sequence
  Description of Artificial Sequence: Synthetic oligonucleotide
  Target: ANGPTL4; (-) strand; PAM type: NRG; PAM sequence: GGG
ttttttatttttttgatggg

SEQ ID NO: 8405 - DNA, 20 bp, Artificial Sequence
  Description of Artificial Sequence: Synthetic oligonucleotide
  Target: ANGPTL4; (-) strand; PAM type: NRG; PAM sequence: GGG
cttttttatttttttgatgg

SEQ ID NO: 8406 - DNA, 20 bp, Artificial Sequence
  Description of Artificial Sequence: Synthetic oligonucleotide
  Target: ANGPTL4; (-) strand; PAM type: NRG; PAM sequence: GGG
tcttttttatttttttgatg

SEQ ID NO: 8407 - DNA, 20 bp, Artificial Sequence
  Description of Artificial Sequence: Synthetic oligonucleotide
  Target: ANGPTL4; (-) strand; PAM type: NRG; PAM sequence: GGG
ctcttttttatttttttgat

SEQ ID NO: 8408 - DNA, 20 bp, Artificial Sequence
  Description of Artificial Sequence: Synthetic oligonucleotide
  Target: ANGPTL4; (-) strand; PAM type: NRG; PAM sequence: TGG
tctcttttttatttttttga

SEQ ID NO: 8409 - DNA, 20 bp, Artificial Sequence
  Description of Artificial Sequence: Synthetic oligonucleotide
  Target: ANGPTL4; (-) strand; PAM type: NRG; PAM sequence: GGG
tgtgccaccatgcccagcaa

SEQ ID NO: 8410 - DNA, 20 bp, Artificial Sequence
  Description of Artificial Sequence: Synthetic oligonucleotide
  Target: ANGPTL4; (-) strand; PAM type: NRG; PAM sequence: AGG
atgtgccaccatgcccagca

SEQ ID NO: 8411 - DNA, 20 bp, Artificial Sequence
  Description of Artificial Sequence: Synthetic oligonucleotide
  Target: ANGPTL4; (-) strand; PAM type: NRG; PAM sequence: AAG
catgtgccaccatgcccagc

SEQ ID NO: 8412 - DNA, 20 bp, Artificial Sequence
  Description of Artificial Sequence: Synthetic oligonucleotide
  Target: ANGPTL4; (-) strand; PAM type: NRG; PAM sequence: CAG
caggcatgtgccaccatgcc

SEQ ID NO: 8413 - DNA, 20 bp, Artificial Sequence
  Description of Artificial Sequence: Synthetic oligonucleotide
  Target: ANGPTL4; (-) strand; PAM type: NRG; PAM sequence: AGG
tcccgagtagctgggactac

SEQ ID NO: 8414 - DNA, 20 bp, Artificial Sequence
  Description of Artificial Sequence: Synthetic oligonucleotide
  Target: ANGPTL4; (-) strand; PAM type: NRG; PAM sequence: CAG
ctcccgagtagctgggacta

SEQ ID NO: 8415 - DNA, 20 bp, Artificial Sequence
  Description of Artificial Sequence: Synthetic oligonucleotide
  Target: ANGPTL4; (-) strand; PAM type: NRG; PAM sequence: GGG
ccttggcctcccgagtagct

SEQ ID NO: 8416 - DNA, 20 bp, Artificial Sequence
  Description of Artificial Sequence: Synthetic oligonucleotide
  Target: ANGPTL4; (-) strand; PAM type: NRG; PAM sequence: TGG
gccttggcctcccgagtagc

SEQ ID NO: 8417 - DNA, 20 bp, Artificial Sequence
  Description of Artificial Sequence: Synthetic oligonucleotide
  Target: ANGPTL4; (-) strand; PAM type: NRG; PAM sequence: TAG
tcctgccttggcctcccgag

SEQ ID NO: 8418 - DNA, 20 bp, Artificial Sequence
  Description of Artificial Sequence: Synthetic oligonucleotide
  Target: ANGPTL4; (-) strand; PAM type: NRG; PAM sequence: GAG
ccctcctgccttggcctccc

SEQ ID NO: 8419 - DNA, 20 bp, Artificial Sequence
  Description of Artificial Sequence: Synthetic oligonucleotide
  Target: ANGPTL4; (-) strand; PAM type: NRG; PAM sequence: TGG
ctgaagtgaccctcctgcct

SEQ ID NO: 8420 - DNA, 20 bp, Artificial Sequence
  Description of Artificial Sequence: Synthetic oligonucleotide
  Target: ANGPTL4; (-) strand; PAM type: NRG; PAM sequence: AAG
agcctttaactcctgggctg

SEQ ID NO: 8421 - DNA, 20 bp, Artificial Sequence
  Description of Artificial Sequence: Synthetic oligonucleotide
  Target: ANGPTL4; (-) strand; PAM type: NRG; PAM sequence: GGG
cacggcagcctttaactcct

SEQ ID NO: 8422 - DNA, 20 bp, Artificial Sequence
  Description of Artificial Sequence: Synthetic oligonucleotide
  Target: ANGPTL4; (-) strand; PAM type: NRG; PAM sequence: TGG
tcacggcagcctttaactcc

SEQ ID NO: 8423 - DNA, 20 bp, Artificial Sequence
  Description of Artificial Sequence: Synthetic oligonucleotide
  Target: ANGPTL4; (-) strand; PAM type: NRG; PAM sequence: CAG
ggtgtgatcacggctcacgg

SEQ ID NO: 8424 - DNA, 20 bp, Artificial Sequence
  Description of Artificial Sequence: Synthetic oligonucleotide
  Target: ANGPTL4; (-) strand; PAM type: NRG; PAM sequence: CGG
acaggtgtgatcacggctca

SEQ ID NO: 8425 - DNA, 20 bp, Artificial Sequence
  Description of Artificial Sequence: Synthetic oligonucleotide
  Target: ANGPTL4; (-) strand; PAM type: NRG; PAM sequence: CGG
gctattcacaggtgtgatca

SEQ ID NO: 8426 - DNA, 20 bp, Artificial Sequence
  Description of Artificial Sequence: Synthetic oligonucleotide
  Target: ANGPTL4; (-) strand; PAM type: NRG; PAM sequence: AGG
ggagtgcggtggctattcac

SEQ ID NO: 8427 - DNA, 20 bp, Artificial Sequence
  Description of Artificial Sequence: Synthetic oligonucleotide
  Target: ANGPTL4; (-) strand; PAM type: NRG; PAM sequence: CAG
tggagtgcggtggctattca

SEQ ID NO: 8428 - DNA, 20 bp, Artificial Sequence
  Description of Artificial Sequence: Synthetic oligonucleotide
  Target: ANGPTL4; (-) strand; PAM type: NRG; PAM sequence: TGG
ttgcccaggttggagtgcgg

SEQ ID NO: 8429 - DNA, 20 bp, Artificial Sequence
  Description of Artificial Sequence: Synthetic oligonucleotide
  Target: ANGPTL4; (-) strand; PAM type: NRG; PAM sequence: CGG
gtgttgcccaggttggagtg

SEQ ID NO: 8430 - DNA, 20 bp, Artificial Sequence
  Description of Artificial Sequence: Synthetic oligonucleotide
  Target: ANGPTL4; (-) strand; PAM type: NRG; PAM sequence: GAG
ttgttgtgttgcccaggttg

SEQ ID NO: 8431 - DNA, 20 bp, Artificial Sequence
  Description of Artificial Sequence: Synthetic oligonucleotide
  Target: ANGPTL4; (-) strand; PAM type: NRG; PAM sequence: TGG
ttttgttgtgttgcccaggt

SEQ ID NO: 8432 - DNA, 20 bp, Artificial Sequence
  Description of Artificial Sequence: Synthetic oligonucleotide
  Target: ANGPTL4; (-) strand; PAM type: NRG; PAM sequence: AGG
gaggttttgttgtgttgccc

SEQ ID NO: 8433 - DNA, 20 bp, Artificial Sequence
  Description of Artificial Sequence: Synthetic oligonucleotide
  Target: ANGPTL4; (-) strand; PAM type: NRG; PAM sequence: CAG
cgaggttttgttgtgttgcc

SEQ ID NO: 8434 - DNA, 20 bp, Artificial Sequence
  Description of Artificial Sequence: Synthetic oligonucleotide
  Target: ANGPTL4; (-) strand; PAM type: NRG; PAM sequence: AGG
tttgtttttttttagaaacg

SEQ ID NO: 8435 - DNA, 20 bp, Artificial Sequence
  Description of Artificial Sequence: Synthetic oligonucleotide
  Target: ANGPTL4; (-) strand; PAM type: NRG; PAM sequence: GAG
ctttgtttttttttagaaac

SEQ ID NO: 8436 - DNA, 20 bp, Artificial Sequence
  Description of Artificial Sequence: Synthetic oligonucleotide
  Target: ANGPTL4; (-) strand; PAM type: NRG; PAM sequence: TAG
gctcagcctttgtttttttt

SEQ ID NO: 8437 - DNA, 20 bp, Artificial Sequence
  Description of Artificial Sequence: Synthetic oligonucleotide
  Target: ANGPTL4; (-) strand; PAM type: NRG; PAM sequence: CAG
caggtgtaagccaccgtgct

SEQ ID NO: 8438 - DNA, 20 bp, Artificial Sequence
  Description of Artificial Sequence: Synthetic oligonucleotide
  Target: ANGPTL4; (-) strand; PAM type: NRG; PAM sequence: AAG
agtgctggcatttcaggtgt

SEQ ID NO: 8439 - DNA, 20 bp, Artificial Sequence
  Description of Artificial Sequence: Synthetic oligonucleotide
  Target: ANGPTL4; (-) strand; PAM type: NRG; PAM sequence: AGG
tcccaaagtgctggcatttc

SEQ ID NO: 8440 - DNA, 20 bp, Artificial Sequence
  Description of Artificial Sequence: Synthetic oligonucleotide
  Target: ANGPTL4; (-) strand; PAM type: NRG; PAM sequence: CAG
ctcccaaagtgctggcattt

SEQ ID NO: 8441 - DNA, 20 bp, Artificial Sequence
  Description of Artificial Sequence: Synthetic oligonucleotide
  Target: ANGPTL4; (-) strand; PAM type: NRG; PAM sequence: TGG
gcctcagcctcccaaagtgc

SEQ ID NO: 8442 - DNA, 20 bp, Artificial Sequence
  Description of Artificial Sequence: Synthetic oligonucleotide
  Target: ANGPTL4; (-) strand; PAM type: NRG; PAM sequence: AAG
ttgcccgcctcagcctccca

SEQ ID NO: 8443 - DNA, 20 bp, Artificial Sequence
  Description of Artificial Sequence: Synthetic oligonucleotide
  Target: ANGPTL4; (-) strand; PAM type: NRG; PAM sequence: CAG
ctcaagtgatttgcccgcct

SEQ ID NO: 8444 - DNA, 20 bp, Artificial Sequence
  Description of Artificial Sequence: Synthetic oligonucleotide
  Target: ANGPTL4; (-) strand; PAM type: NRG; PAM sequence: AAG
ggtcttgaacttctgacctc

SEQ ID NO: 8445 - DNA, 20 bp, Artificial Sequence
  Description of Artificial Sequence: Synthetic oligonucleotide
  Target: ANGPTL4; (-) strand; PAM type: NRG; PAM sequence: TGG
tttcaccatgttggccaggc

SEQ ID NO: 8446 - DNA, 20 bp, Artificial Sequence
  Description of Artificial Sequence: Synthetic oligonucleotide
  Target: ANGPTL4; (-) strand; PAM type: NRG; PAM sequence: AGG
agggtttcaccatgttggcc

SEQ ID NO: 8447 - DNA, 20 bp, Artificial Sequence
  Description of Artificial Sequence: Synthetic oligonucleotide
  Target: ANGPTL4; (-) strand; PAM type: NRG; PAM sequence: CAG
tagggtttcaccatgttggc

SEQ ID NO: 8448 - DNA, 20 bp, Artificial Sequence
  Description of Artificial Sequence: Synthetic oligonucleotide
  Target: ANGPTL4; (-) strand; PAM type: NRG; PAM sequence: TGG
gagatagggtttcaccatgt

SEQ ID NO: 8449 - DNA, 20 bp, Artificial Sequence
  Description of Artificial Sequence: Synthetic oligonucleotide
  Target: ANGPTL4; (-) strand; PAM type: NRG; PAM sequence: GGG
tgtttatgttggtagagata

SEQ ID NO: 8450 - DNA, 20 bp, Artificial Sequence
  Description of Artificial Sequence: Synthetic oligonucleotide
  Target: ANGPTL4; (-) strand; PAM type: NRG; PAM sequence: AGG
atgtttatgttggtagagat

SEQ ID NO: 8451 - DNA, 20 bp, Artificial Sequence
  Description of Artificial Sequence: Synthetic oligonucleotide
  Target: ANGPTL4; (-) strand; PAM type: NRG; PAM sequence: TAG
aatgtttatgttggtagaga

SEQ ID NO: 8452 - DNA, 20 bp, Artificial Sequence
  Description of Artificial Sequence: Synthetic oligonucleotide
  Target: ANGPTL4; (-) strand; PAM type: NRG; PAM sequence: GAG
ggctaatgtttatgttggta

SEQ ID NO: 8453 - DNA, 20 bp, Artificial Sequence
  Description of Artificial Sequence: Synthetic oligonucleotide
  Target: ANGPTL4; (-) strand; PAM type: NRG; PAM sequence: TAG
ccggctaatgtttatgttgg

SEQ ID NO: 8454 - DNA, 20 bp, Artificial Sequence
  Description of Artificial Sequence: Synthetic oligonucleotide
  Target: ANGPTL4; (-) strand; PAM type: NRG; PAM sequence: TGG
cgcccggctaatgtttatgt

SEQ ID NO: 8455 - DNA, 20 bp, Artificial Sequence
  Description of Artificial Sequence: Synthetic oligonucleotide
  Target: ANGPTL4; (-) strand; PAM type: NRG; PAM sequence: CGG
gctggaatcacaggcacgcc

SEQ ID NO: 8456 - DNA, 20 bp, Artificial Sequence
  Description of Artificial Sequence: Synthetic oligonucleotide
  Target: ANGPTL4; (-) strand; PAM type: NRG; PAM sequence: AGG
ccacaagcagctggaatcac

SEQ ID NO: 8457 - DNA, 20 bp, Artificial Sequence
  Description of Artificial Sequence: Synthetic oligonucleotide
  Target: ANGPTL4; (-) strand; PAM type: NRG; PAM sequence: CAG
cccacaagcagctggaatca

SEQ ID NO: 8458 - DNA, 20 bp, Artificial Sequence
  Description of Artificial Sequence: Synthetic oligonucleotide
  Target: ANGPTL4; (-) strand; PAM type: NRG; PAM sequence: TGG
gcttcagccccacaagcagc

SEQ ID NO: 8459 - DNA, 20 bp, Artificial Sequence
  Description of Artificial Sequence: Synthetic oligonucleotide
  Target: ANGPTL4; (-) strand; PAM type: NRG; PAM sequence: CAG
ttgtgcttcagccccacaag

SEQ ID NO: 8460 - DNA, 20 bp, Artificial Sequence
  Description of Artificial Sequence: Synthetic oligonucleotide
  Target: ANGPTL4; (-) strand; PAM type: NRG; PAM sequence: AAG
ttcttgtgcttcagccccac

SEQ ID NO: 8461 - DNA, 20 bp, Artificial Sequence
  Description of Artificial Sequence: Synthetic oligonucleotide
  Target: ANGPTL4; (-) strand; PAM type: NRG; PAM sequence: CAG
ctcaagcgattcttgtgctt

SEQ ID NO: 8462 - DNA, 20 bp, Artificial Sequence
  Description of Artificial Sequence: Synthetic oligonucleotide
  Target: ANGPTL4; (-) strand; PAM type: NRG; PAM sequence: AAG
aacctctgccttcggggctc

SEQ ID NO: 8463 - DNA, 20 bp, Artificial Sequence
  Description of Artificial Sequence: Synthetic oligonucleotide
  Target: ANGPTL4; (-) strand; PAM type: NRG; PAM sequence: GGG
cactgcaacctctgccttcg

SEQ ID NO: 8464 - DNA, 20 bp, Artificial Sequence
  Description of Artificial Sequence: Synthetic oligonucleotide
  Target: ANGPTL4; (-) strand; PAM type: NRG; PAM sequence: GGG
tcactgcaacctctgccttc

SEQ ID NO: 8465 - DNA, 20 bp, Artificial Sequence
  Description of Artificial Sequence: Synthetic oligonucleotide
  Target: ANGPTL4; (-) strand; PAM type: NRG; PAM sequence: CGG
ctcactgcaacctctgcctt

SEQ ID NO: 8466 - DNA, 20 bp, Artificial Sequence
  Description of Artificial Sequence: Synthetic oligonucleotide
  Target: ANGPTL4; (-) strand; PAM type: NRG; PAM sequence: CAG
ggatcgcagtgccgcaatct

SEQ ID NO: 8467 - DNA, 20 bp, Artificial Sequence
  Description of Artificial Sequence: Synthetic oligonucleotide
  Target: ANGPTL4; (-) strand; PAM type: NRG; PAM sequence: CAG
ctgttgcccaggctggatcg

SEQ ID NO: 8468 - DNA, 20 bp, Artificial Sequence
  Description of Artificial Sequence: Synthetic oligonucleotide
  Target: ANGPTL4; (-) strand; PAM type: NRG; PAM sequence: TGG
tctcactctgttgcccaggc

SEQ ID NO: 8469 - DNA, 20 bp, Artificial Sequence
  Description of Artificial Sequence: Synthetic oligonucleotide
  Target: ANGPTL4; (-) strand; PAM type: NRG; PAM sequence: AGG
ggagtctcactctgttgccc

SEQ ID NO: 8470 - DNA, 20 bp, Artificial Sequence
  Description of Artificial Sequence: Synthetic oligonucleotide
  Target: ANGPTL4; (-) strand; PAM type: NRG; PAM sequence: CAG
tggagtctcactctgttgcc

SEQ ID NO: 8471 - DNA, 20 bp, Artificial Sequence
  Description of Artificial Sequence: Synthetic oligonucleotide
  Target: ANGPTL4; (-) strand; PAM type: NRG; PAM sequence: GAG
tttttttttttttagagatg

SEQ ID NO: 8472 - DNA, 20 bp, Artificial Sequence
  Description of Artificial Sequence: Synthetic oligonucleotide
  Target: ANGPTL4; (-) strand; PAM type: NRG; PAM sequence: TGG
tttttttttttttttagaga

SEQ ID NO: 8473 - DNA, 20 bp, Artificial Sequence
  Description of Artificial Sequence: Synthetic oligonucleotide
  Target: ANGPTL4; (-) strand; PAM type: NRG; PAM sequence: GAG
ttttttttttttttttttta

SEQ ID NO: 8474 - DNA, 20 bp, Artificial Sequence
  Description of Artificial Sequence: Synthetic oligonucleotide
  Target: ANGPTL4; (-) strand; PAM type: NRG; PAM sequence: TAG
tttttttttttttttttttt

SEQ ID NO: 8475 - DNA, 20 bp, Artificial Sequence
  Description of Artificial Sequence: Synthetic oligonucleotide
  Target: ANGPTL4; (-) strand; PAM type: NRG; PAM sequence: AAG
ggacttctcagtggaaaaaa

SEQ ID NO: 8476 - DNA, 20 bp, Artificial Sequence
  Description of Artificial Sequence: Synthetic oligonucleotide
  Target: ANGPTL4; (-) strand; PAM type: NRG; PAM sequence: TGG
taatggaaaggacttctcag

SEQ ID NO: 8477 - DNA, 20 bp, Artificial Sequence
  Description of Artificial Sequence: Synthetic oligonucleotide
  Target: ANGPTL4; (-) strand; PAM type: NRG; PAM sequence: CAG
ttgtaatggaaaggacttct

SEQ ID NO: 8478 - DNA, 20 bp, Artificial Sequence
  Description of Artificial Sequence: Synthetic oligonucleotide
  Target: ANGPTL4; (-) strand; PAM type: NRG; PAM sequence: AGG
tgtaacctcttgtaatggaa

SEQ ID NO: 8479 - DNA, 20 bp, Artificial Sequence
  Description of Artificial Sequence: Synthetic oligonucleotide
  Target: ANGPTL4; (-) strand; PAM type: NRG; PAM sequence: AAG
ttgtaacctcttgtaatgga

SEQ ID NO: 8480 - DNA, 20 bp, Artificial Sequence
  Description of Artificial Sequence: Synthetic oligonucleotide
  Target: ANGPTL4; (-) strand; PAM type: NRG; PAM sequence: TGG
cgtgttgtaacctcttgtaa

SEQ ID NO: 8481 - DNA, 20 bp, Artificial Sequence
  Description of Artificial Sequence: Synthetic oligonucleotide
  Target: ANGPTL4; (-) strand; PAM type: NRG; PAM sequence: GGG
ctctctgggccagctgaact

SEQ ID NO: 8482 - DNA, 20 bp, Artificial Sequence
  Description of Artificial Sequence: Synthetic oligonucleotide
  Target: ANGPTL4; (-) strand; PAM type: NRG; PAM sequence: TGG
cctctctgggccagctgaac

SEQ ID NO: 8483 - DNA, 20 bp, Artificial Sequence
  Description of Artificial Sequence: Synthetic oligonucleotide
  Target: ANGPTL4; (-) strand; PAM type: NRG; PAM sequence: CAG
tctgcaaagcctctctgggc

SEQ ID NO: 8484 - DNA, 20 bp, Artificial Sequence
  Description of Artificial Sequence: Synthetic oligonucleotide
  Target: ANGPTL4; (-) strand; PAM type: NRG; PAM sequence: GGG
gaaatctgcaaagcctctct

SEQ ID NO: 8485 - DNA, 20 bp, Artificial Sequence
  Description of Artificial Sequence: Synthetic oligonucleotide
  Target: ANGPTL4; (-) strand; PAM type: NRG; PAM sequence: TGG
ggaaatctgcaaagcctctc

SEQ ID NO: 8486 - DNA, 20 bp, Artificial Sequence
  Description of Artificial Sequence: Synthetic oligonucleotide
  Target: ANGPTL4; (-) strand; PAM type: NRG; PAM sequence: AAG
gtaggcagtggaaatctgca

SEQ ID NO: 8487 - DNA, 20 bp, Artificial Sequence
  Description of Artificial Sequence: Synthetic oligonucleotide
  Target: ANGPTL4; (-) strand; PAM type: NRG; PAM sequence: TGG
gtgtgggagggagtaggcag

SEQ ID NO: 8488 - DNA, 20 bp, Artificial Sequence
  Description of Artificial Sequence: Synthetic oligonucleotide
  Target: ANGPTL4; (-) strand; PAM type: NRG; PAM sequence: CAG
tgagtgtgggagggagtagg

SEQ ID NO: 8489 - DNA, 20 bp, Artificial Sequence
  Description of Artificial Sequence: Synthetic oligonucleotide
  Target: ANGPTL4; (-) strand; PAM type: NRG; PAM sequence: AGG
gactgagtgtgggagggagt

SEQ ID NO: 8490 - DNA, 20 bp, Artificial Sequence
  Description of Artificial Sequence: Synthetic oligonucleotide
  Target: ANGPTL4; (-) strand; PAM type: NRG; PAM sequence: TAG
ggactgagtgtgggagggag

SEQ ID NO: 8491 - DNA, 20 bp, Artificial Sequence
  Description of Artificial Sequence: Synthetic oligonucleotide
  Target: ANGPTL4; (-) strand; PAM type: NRG; PAM sequence: GAG
cagggactgagtgtgggagg

SEQ ID NO: 8492 - DNA, 20 bp, Artificial Sequence
  Description of Artificial Sequence: Synthetic oligonucleotide
  Target: ANGPTL4; (-) strand; PAM type: NRG; PAM sequence: GGG
agcagggactgagtgtggga

SEQ ID NO: 8493 - DNA, 20 bp, Artificial Sequence
  Description of Artificial Sequence: Synthetic oligonucleotide
  Target: ANGPTL4; (-) strand; PAM type: NRG; PAM sequence: AGG
cagcagggactgagtgtggg

SEQ ID NO: 8494 - DNA, 20 bp, Artificial Sequence
  Description of Artificial Sequence: Synthetic oligonucleotide
  Target: ANGPTL4; (-) strand; PAM type: NRG; PAM sequence: GAG
ccagcagggactgagtgtgg

SEQ ID NO: 8495 - DNA, 20 bp, Artificial Sequence
  Description of Artificial Sequence: Synthetic oligonucleotide
  Target: ANGPTL4; (-) strand; PAM type: NRG; PAM sequence: GGG
acccagcagggactgagtgt

SEQ ID NO: 8496 - DNA, 20 bp, Artificial Sequence
  Description of Artificial Sequence: Synthetic oligonucleotide
  Target: ANGPTL4; (-) strand; PAM type: NRG; PAM sequence: TGG
aacccagcagggactgagtg

SEQ ID NO: 8497 - DNA, 20 bp, Artificial Sequence
  Description of Artificial Sequence: Synthetic oligonucleotide
  Target: ANGPTL4; (-) strand; PAM type: NRG; PAM sequence: GAG
ccaagaacccagcagggact

SEQ ID NO: 8498 - DNA, 20 bp, Artificial Sequence
  Description of Artificial Sequence: Synthetic oligonucleotide
  Target: ANGPTL4; (-) strand; PAM type: NRG; PAM sequence: GGG
tttgtcccaagaacccagca

SEQ ID NO: 8499 - DNA, 20 bp, Artificial Sequence
  Description of Artificial Sequence: Synthetic oligonucleotide
  Target: ANGPTL4; (-) strand; PAM type: NRG; PAM sequence: AGG
ctttgtcccaagaacccagc

SEQ ID NO: 8500 - DNA, 20 bp, Artificial Sequence
  Description of Artificial Sequence: Synthetic oligonucleotide
  Target: ANGPTL4; (-) strand; PAM type: NRG; PAM sequence: CAG
tctttgtcccaagaacccag

SEQ ID NO: 8501 - DNA, 20 bp, Artificial Sequence
  Description of Artificial Sequence: Synthetic oligonucleotide
  Target: ANGPTL4; (-) strand; PAM type: NRG; PAM sequence: CAG
agatctttgtcccaagaacc

SEQ ID NO: 8502 - DNA, 20 bp, Artificial Sequence
  Description of Artificial Sequence: Synthetic oligonucleotide
  Target: ANGPTL4; (-) strand; PAM type: NRG; PAM sequence: AAG
cttgggaagatctttgtccc

SEQ ID NO: 8503 - DNA, 20 bp, Artificial Sequence
  Description of Artificial Sequence: Synthetic oligonucleotide
  Target: ANGPTL4; (-) strand; PAM type: NRG; PAM sequence: AAG
tattatgggctggccttggg

SEQ ID NO: 8504 - DNA, 20 bp, Artificial Sequence
  Description of Artificial Sequence: Synthetic oligonucleotide
  Target: ANGPTL4; (-) strand; PAM type: NRG; PAM sequence: GGG
gaatattatgggctggcctt

SEQ ID NO: 8505 - DNA, 20 bp, Artificial Sequence
  Description of Artificial Sequence: Synthetic oligonucleotide
  Target: ANGPTL4; (-) strand; PAM type: NRG; PAM sequence: TGG
ggaatattatgggctggcct

SEQ ID NO: 8506 - DNA, 20 bp, Artificial Sequence
  Description of Artificial Sequence: Synthetic oligonucleotide
  Target: ANGPTL4; (-) strand; PAM type: NRG; PAM sequence: TGG
gagggaggaatattatgggc

SEQ ID NO: 8507 - DNA, 20 bp, Artificial Sequence
  Description of Artificial Sequence: Synthetic oligonucleotide
  Target: ANGPTL4; (-) strand; PAM type: NRG; PAM sequence: GGG
gtcagagggaggaatattat

SEQ ID NO: 8508 - DNA, 20 bp, Artificial Sequence
  Description of Artificial Sequence: Synthetic oligonucleotide
  Target: ANGPTL4; (-) strand; PAM type: NRG; PAM sequence: TGG
ggtcagagggaggaatatta

SEQ ID NO: 8509 - DNA, 20 bp, Artificial Sequence
  Description of Artificial Sequence: Synthetic oligonucleotide
  Target: ANGPTL4; (-) strand; PAM type: NRG; PAM sequence: AGG
gaggagggtgggtcagaggg

SEQ ID NO: 8510 - DNA, 20 bp, Artificial Sequence
  Description of Artificial Sequence: Synthetic oligonucleotide
  Target: ANGPTL4; (-) strand; PAM type: NRG; PAM sequence: GAG
cgaggagggtgggtcagagg

SEQ ID NO: 8511 - DNA, 20 bp, Artificial Sequence
  Description of Artificial Sequence: Synthetic oligonucleotide
  Target: ANGPTL4; (-) strand; PAM type: NRG; PAM sequence: GGG
ctcgaggagggtgggtcaga

SEQ ID NO: 8512 - DNA, 20 bp, Artificial Sequence
  Description of Artificial Sequence: Synthetic oligonucleotide
  Target: ANGPTL4; (-) strand; PAM type: NRG; PAM sequence: AGG
actcgaggagggtgggtcag

SEQ ID NO: 8513 - DNA, 20 bp, Artificial Sequence
  Description of Artificial Sequence: Synthetic oligonucleotide
  Target: ANGPTL4; (-) strand; PAM type: NRG; PAM sequence: GAG
gactcgaggagggtgggtca

SEQ ID NO: 8514 - DNA, 20 bp, Artificial Sequence
  Description of Artificial Sequence: Synthetic oligonucleotide
  Target: ANGPTL4; (-) strand; PAM type: NRG; PAM sequence: CAG
aggactcgaggagggtgggt

SEQ ID NO: 8515 - DNA, 20 bp, Artificial Sequence
  Description of Artificial Sequence: Synthetic oligonucleotide
  Target: ANGPTL4; (-) strand; PAM type: NRG; PAM sequence: GGG
ctggaggactcgaggagggt

SEQ ID NO: 8516 - DNA, 20 bp, Artificial Sequence
  Description of Artificial Sequence: Synthetic oligonucleotide
  Target: ANGPTL4; (-) strand; PAM type: NRG; PAM sequence: TGG
cctggaggactcgaggaggg

SEQ ID NO: 8517 - DNA, 20 bp, Artificial Sequence
  Description of Artificial Sequence: Synthetic oligonucleotide
  Target: ANGPTL4; (-) strand; PAM type: NRG; PAM sequence: GGG
atccctggaggactcgagga

SEQ ID NO: 8518 - DNA, 20 bp, Artificial Sequence
  Description of Artificial Sequence: Synthetic oligonucleotide
  Target: ANGPTL4; (-) strand; PAM type: NRG; PAM sequence: AGG
catccctggaggactcgagg

SEQ ID NO: 8519 - DNA, 20 bp, Artificial Sequence
  Description of Artificial Sequence: Synthetic oligonucleotide
  Target: ANGPTL4; (-) strand; PAM type: NRG; PAM sequence: GAG
tcatccctggaggactcgag

SEQ ID NO: 8520 - DNA, 20 bp, Artificial Sequence
  Description of Artificial Sequence: Synthetic oligonucleotide
  Target: ANGPTL4; (-) strand; PAM type: NRG; PAM sequence: AGG
actcatccctggaggactcg

SEQ ID NO: 8521 - DNA, 20 bp, Artificial Sequence
  Description of Artificial Sequence: Synthetic oligonucleotide
  Target: ANGPTL4; (-) strand; PAM type: NRG; PAM sequence: GAG
cactcatccctggaggactc

SEQ ID NO: 8522 - DNA, 20 bp, Artificial Sequence
  Description of Artificial Sequence: Synthetic oligonucleotide
  Target: ANGPTL4; (-) strand; PAM type: NRG; PAM sequence: AGG
gctccctcactcatccctgg

SEQ ID NO: 8523 - DNA, 20 bp, Artificial Sequence
  Description of Artificial Sequence: Synthetic oligonucleotide
  Target: ANGPTL4; (-) strand; PAM type: NRG; PAM sequence: GAG
agctccctcactcatccctg

SEQ ID NO: 8524 - DNA, 20 bp, Artificial Sequence
  Description of Artificial Sequence: Synthetic oligonucleotide
  Target: ANGPTL4; (-) strand; PAM type: NRG; PAM sequence: TGG
gcagctccctcactcatccc

SEQ ID NO: 8525 - DNA, 20 bp, Artificial Sequence
  Description of Artificial Sequence: Synthetic oligonucleotide
  Target: ANGPTL4; (-) strand; PAM type: NRG; PAM sequence: CAG
ctccaaacccaggaagacag

SEQ ID NO: 8526 - DNA, 20 bp, Artificial Sequence
  Description of Artificial Sequence: Synthetic oligonucleotide
  Target: ANGPTL4; (-) strand; PAM type: NRG; PAM sequence: CAG
cccctccaaacccaggaaga

SEQ ID NO: 8527 - DNA, 20 bp, Artificial Sequence
  Description of Artificial Sequence: Synthetic oligonucleotide
  Target: ANGPTL4; (-) strand; PAM type: NRG; PAM sequence: AAG
aaaccccctccaaacccagg

SEQ ID NO: 8528 - DNA, 20 bp, Artificial Sequence
  Description of Artificial Sequence: Synthetic oligonucleotide
  Target: ANGPTL4; (-) strand; PAM type: NRG; PAM sequence: AGG
accaaaccccctccaaaccc

SEQ ID NO: 8529 - DNA, 20 bp, Artificial Sequence
  Description of Artificial Sequence: Synthetic oligonucleotide
  Target: ANGPTL4; (-) strand; PAM type: NRG; PAM sequence: CAG
caccaaaccccctccaaacc

SEQ ID NO: 8530 - DNA, 20 bp, Artificial Sequence
  Description of Artificial Sequence: Synthetic oligonucleotide
  Target: ANGPTL4; (-) strand; PAM type: NRG; PAM sequence: AAG
cactccctcatctggctgcc

SEQ ID NO: 8531 - DNA, 20 bp, Artificial Sequence
  Description of Artificial Sequence: Synthetic oligonucleotide
  Target: ANGPTL4; (-) strand; PAM type: NRG; PAM sequence: TGG
gacgaccccactccctcatc

SEQ ID NO: 8532 - DNA, 20 bp, Artificial Sequence
  Description of Artificial Sequence: Synthetic oligonucleotide
  Target: ANGPTL4; (-) strand; PAM type: NRG; PAM sequence: CAG
caccaggaagtccctcttca

SEQ ID NO: 8533 - DNA, 20 bp, Artificial Sequence
  Description of Artificial Sequence: Synthetic oligonucleotide
  Target: ANGPTL4; (-) strand; PAM type: NRG; PAM sequence: AAG
aaaggtacaaggtcaccagg

SEQ ID NO: 8534 - DNA, 20 bp, Artificial Sequence
  Description of Artificial Sequence: Synthetic oligonucleotide
  Target: ANGPTL4; (-) strand; PAM type: NRG; PAM sequence: AGG
cagaaaggtacaaggtcacc

SEQ ID NO: 8535 - DNA, 20 bp, Artificial Sequence
  Description of Artificial Sequence: Synthetic oligonucleotide
  Target: ANGPTL4; (-) strand; PAM type: NRG; PAM sequence: CAG
ccagaaaggtacaaggtcac

SEQ ID NO: 8536 - DNA, 20 bp, Artificial Sequence
  Description of Artificial Sequence: Synthetic oligonucleotide
  Target: ANGPTL4; (-) strand; PAM type: NRG; PAM sequence: AGG
catctgcccagaaaggtaca

SEQ ID NO: 8537 - DNA, 20 bp, Artificial Sequence
  Description of Artificial Sequence: Synthetic oligonucleotide
  Target: ANGPTL4; (-) strand; PAM type: NRG; PAM sequence: AAG
ccatctgcccagaaaggtac

SEQ ID NO: 8538 - DNA, 20 bp, Artificial Sequence
  Description of Artificial Sequence: Synthetic oligonucleotide
  Target: ANGPTL4; (-) strand; PAM type: NRG; PAM sequence: AGG
cagcctccatctgcccagaa

SEQ ID NO: 8539 - DNA, 20 bp, Artificial Sequence
  Description of Artificial Sequence: Synthetic oligonucleotide
  Target: ANGPTL4; (-) strand; PAM type: NRG; PAM sequence: AAG
ccagcctccatctgcccaga

SEQ ID NO: 8540 - DNA, 20 bp, Artificial Sequence
  Description of Artificial Sequence: Synthetic oligonucleotide
  Target: ANGPTL4; (-) strand; PAM type: NRG; PAM sequence: CAG
ctgtccagcctccatctgcc

SEQ ID NO: 8541 - DNA, 20 bp, Artificial Sequence
  Description of Artificial Sequence: Synthetic oligonucleotide
  Target: ANGPTL4; (-) strand; PAM type: NRG; PAM sequence: CAG
ggcgcctctgaattactgtc

SEQ ID NO: 8542 - DNA, 20 bp, Artificial Sequence
  Description of Artificial Sequence: Synthetic oligonucleotide
  Target: ANGPTL4; (-) strand; PAM type: NRG; PAM sequence: TGG
tgaagtccactgagccatcg

SEQ ID NO: 8543 - DNA, 20 bp, Artificial Sequence
  Description of Artificial Sequence: Synthetic oligonucleotide
  Target: ANGPTL4; (-) strand; PAM type: NRG; PAM sequence: GAG
agggccggttgaagtccact

SEQ ID NO: 8544 - DNA, 20 bp, Artificial Sequence
  Description of Artificial Sequence: Synthetic oligonucleotide
  Target: ANGPTL4; (-) strand; PAM type: NRG; PAM sequence: AAG
aggcttcccagggccggttg

SEQ ID NO: 8545 - DNA, 20 bp, Artificial Sequence
  Description of Artificial Sequence: Synthetic oligonucleotide
  Target: ANGPTL4; (-) strand; PAM type: NRG; PAM sequence: CGG
ccttgtaggcttcccagggc

SEQ ID NO: 8546 - DNA, 20 bp, Artificial Sequence
  Description of Artificial Sequence: Synthetic oligonucleotide
  Target: ANGPTL4; (-) strand; PAM type: NRG; PAM sequence: GGG
cccgccttgtaggcttccca

SEQ ID NO: 8547 - DNA, 20 bp, Artificial Sequence
  Description of Artificial Sequence: Synthetic oligonucleotide
  Target: ANGPTL4; (-) strand; PAM type: NRG; PAM sequence: AGG
ccccgccttgtaggcttccc

SEQ ID NO: 8548 - DNA, 20 bp, Artificial Sequence
  Description of Artificial Sequence: Synthetic oligonucleotide
  Target: ANGPTL4; (-) strand; PAM type: NRG; PAM sequence: CAG
accccgccttgtaggcttcc

SEQ ID NO: 8549 - DNA, 20 bp, Artificial Sequence
  Description of Artificial Sequence: Synthetic oligonucleotide
  Target: ANGPTL4; (-) strand; PAM type: NRG; PAM sequence: AGG
atccccaaaccccgccttgt

SEQ ID NO: 8550 - DNA, 20 bp, Artificial Sequence
  Description of Artificial Sequence: Synthetic oligonucleotide
  Target: ANGPTL4; (-) strand; PAM type: NRG; PAM sequence: TAG
gatccccaaaccccgccttg

SEQ ID NO: 8551 - DNA, 20 bp, Artificial Sequence
  Description of Artificial Sequence: Synthetic oligonucleotide
  Target: ANGPTL4; (-) strand; PAM type: NRG; PAM sequence: GGG
cactagaaacacctaccgtg

SEQ ID NO: 8552 - DNA, 20 bp, Artificial Sequence
  Description of Artificial Sequence: Synthetic oligonucleotide
  Target: ANGPTL4; (-) strand; PAM type: NRG; PAM sequence: GGG
ccactagaaacacctaccgt

SEQ ID NO: 8553 - DNA, 20 bp, Artificial Sequence
  Description of Artificial Sequence: Synthetic oligonucleotide
  Target: ANGPTL4; (-) strand; PAM type: NRG; PAM sequence: TGG
cccactagaaacacctaccg

SEQ ID NO: 8554 - DNA, 20 bp, Artificial Sequence
  Description of Artificial Sequence: Synthetic oligonucleotide
  Target: ANGPTL4; (-) strand; PAM type: NRG; PAM sequence: TAG
tcccctgcctctgtccccac

SEQ ID NO: 8555 - DNA, 20 bp, Artificial Sequence
  Description of Artificial Sequence: Synthetic oligonucleotide
  Target: ANGPTL4; (-) strand; PAM type: NRG; PAM sequence: GGG
tgaggcagggccacttctga

SEQ ID NO: 8556 - DNA, 20 bp, Artificial Sequence
  Description of Artificial Sequence: Synthetic oligonucleotide
  Target: ANGPTL4; (-) strand; PAM type: NRG; PAM sequence: AGG
atgaggcagggccacttctg

SEQ ID NO: 8557 - DNA, 20 bp, Artificial Sequence
  Description of Artificial Sequence: Synthetic oligonucleotide
  Target: ANGPTL4; (-) strand; PAM type: NRG; PAM sequence: GAG
catgaggcagggccacttct

SEQ ID NO: 8558 - DNA, 20 bp, Artificial Sequence
  Description of Artificial Sequence: Synthetic oligonucleotide
  Target: ANGPTL4; (-) strand; PAM type: NRG; PAM sequence: GGG
agaggccactccatgaggca

SEQ ID NO: 8559 - DNA, 20 bp, Artificial Sequence
  Description of Artificial Sequence: Synthetic oligonucleotide
  Target: ANGPTL4; (-) strand; PAM type: NRG; PAM sequence: AGG
gagaggccactccatgaggc

SEQ ID NO: 8560 - DNA, 20 bp, Artificial Sequence
  Description of Artificial Sequence: Synthetic oligonucleotide
  Target: ANGPTL4; (-) strand; PAM type: NRG; PAM sequence: CAG
ggagaggccactccatgagg

SEQ ID NO: 8561 - DNA, 20 bp, Artificial Sequence
  Description of Artificial Sequence: Synthetic oligonucleotide
  Target: ANGPTL4; (-) strand; PAM type: NRG; PAM sequence: AGG
gtgggagaggccactccatg

SEQ ID NO: 8562 - DNA, 20 bp, Artificial Sequence
  Description of Artificial Sequence: Synthetic oligonucleotide
  Target: ANGPTL4; (-) strand; PAM type: NRG; PAM sequence: GAG
agtgggagaggccactccat

SEQ ID NO: 8563 - DNA, 20 bp, Artificial Sequence
  Description of Artificial Sequence: Synthetic oligonucleotide
  Target: ANGPTL4; (-) strand; PAM type: NRG; PAM sequence: AGG
gaactcgcctggagtgggag

SEQ ID NO: 8564 - DNA, 20 bp, Artificial Sequence
  Description of Artificial Sequence: Synthetic oligonucleotide
  Target: ANGPTL4; (-) strand; PAM type: NRG; PAM sequence: GAG
agaactcgcctggagtggga

SEQ ID NO: 8565 - DNA, 20 bp, Artificial Sequence
  Description of Artificial Sequence: Synthetic oligonucleotide
  Target: ANGPTL4; (-) strand; PAM type: NRG; PAM sequence: GAG
ccagaactcgcctggagtgg

SEQ ID NO: 8566 - DNA, 20 bp, Artificial Sequence
  Description of Artificial Sequence: Synthetic oligonucleotide
  Target: ANGPTL4; (-) strand; PAM type: NRG; PAM sequence: GGG
agccagaactcgcctggagt

SEQ ID NO: 8567 - DNA, 20 bp, Artificial Sequence
  Description of Artificial Sequence: Synthetic oligonucleotide
  Target: ANGPTL4; (-) strand; PAM type: NRG; PAM sequence: TGG
cagccagaactcgcctggag

SEQ ID NO: 8568 - DNA, 20 bp, Artificial Sequence
  Description of Artificial Sequence: Synthetic oligonucleotide
  Target: ANGPTL4; (-) strand; PAM type: NRG; PAM sequence: GAG
acccagccagaactcgcctg

SEQ ID NO: 8569 - DNA, 20 bp, Artificial Sequence
  Description of Artificial Sequence: Synthetic oligonucleotide
  Target: ANGPTL4; (-) strand; PAM type: NRG; PAM sequence: TGG
agacccagccagaactcgcc

SEQ ID NO: 8570 - DNA, 20 bp, Artificial Sequence
  Description of Artificial Sequence: Synthetic oligonucleotide
  Target: ANGPTL4; (-) strand; PAM type: NRG; PAM sequence: CAG
gcaccttctccagacccagc

SEQ ID NO: 8571 - DNA, 20 bp, Artificial Sequence
  Description of Artificial Sequence: Synthetic oligonucleotide
  Target: ANGPTL4; (-) strand; PAM type: NRG; PAM sequence: CAG
ctatgcaccttctccagacc

SEQ ID NO: 8572 - DNA, 20 bp, Artificial Sequence
  Description of Artificial Sequence: Synthetic oligonucleotide
  Target: ANGPTL4; (-) strand; PAM type: NRG; PAM sequence: CAG
gtgatgctatgcaccttctc

SEQ ID NO: 8573 - DNA, 20 bp, Artificial Sequence
  Description of Artificial Sequence: Synthetic oligonucleotide
  Target: ANGPTL4; (-) strand; PAM type: NRG; PAM sequence: CGG
gcacggccaggcggctgttg

SEQ ID NO: 8574 - DNA, 20 bp, Artificial Sequence
  Description of Artificial Sequence: Synthetic oligonucleotide
  Target: ANGPTL4; (-) strand; PAM type: NRG; PAM sequence: CGG
cccgcagctgcacggccagg

SEQ ID NO: 8575 - DNA, 20 bp, Artificial Sequence
  Description of Artificial Sequence: Synthetic oligonucleotide
  Target: ANGPTL4; (-) strand; PAM type: NRG; PAM sequence: AGG
agtcccgcagctgcacggcc

SEQ ID NO: 8576 - DNA, 20 bp, Artificial Sequence
  Description of Artificial Sequence: Synthetic oligonucleotide
  Target: ANGPTL4; (-) strand; PAM type: NRG; PAM sequence: CAG
cagtcccgcagctgcacggc

SEQ ID NO: 8577 - DNA, 20 bp, Artificial Sequence
  Description of Artificial Sequence: Synthetic oligonucleotide
  Target: ANGPTL4; (-) strand; PAM type: NRG; PAM sequence: CGG
atcccagtcccgcagctgca

SEQ ID NO: 8578 - DNA, 20 bp, Artificial Sequence
  Description of Artificial Sequence: Synthetic oligonucleotide
  Target: ANGPTL4; (-) strand; PAM type: NRG; PAM sequence: CAG
gcgttgccatcccagtcccg

SEQ ID NO: 8579 - DNA, 20 bp, Artificial Sequence
  Description of Artificial Sequence: Synthetic oligonucleotide
  Target: ANGPTL4; (-) strand; PAM type: NRG; PAM sequence: CAG
gcaactcggcgttgccatcc

SEQ ID NO: 8580 - DNA, 20 bp, Artificial Sequence
  Description of Artificial Sequence: Synthetic oligonucleotide
  Target: ANGPTL4; (-) strand; PAM type: NRG; PAM sequence: CGG
cacggagaactgcagcaact

SEQ ID NO: 8581 - DNA, 20 bp, Artificial Sequence
  Description of Artificial Sequence: Synthetic oligonucleotide
  Target: ANGPTL4; (-) strand; PAM type: NRG; PAM sequence: CAG
cccaggtgcacggagaactg

SEQ ID NO: 8582 - DNA, 20 bp, Artificial Sequence
  Description of Artificial Sequence: Synthetic oligonucleotide
  Target: ANGPTL4; (-) strand; PAM type: NRG; PAM sequence: GAG
cctcgccacccaggtgcacg

SEQ ID NO: 8583 - DNA, 20 bp, Artificial Sequence
  Description of Artificial Sequence: Synthetic oligonucleotide
  Target: ANGPTL4; (-) strand; PAM type: NRG; PAM sequence: CGG
gtcctcgccacccaggtgca

SEQ ID NO: 8584 - DNA, 20 bp, Artificial Sequence
  Description of Artificial Sequence: Synthetic oligonucleotide
  Target: ANGPTL4; (-) strand; PAM type: NRG; PAM sequence: AGG
aggccgtgtcctcgccaccc

SEQ ID NO: 8585 - DNA, 20 bp, Artificial Sequence
  Description of Artificial Sequence: Synthetic oligonucleotide
  Target: ANGPTL4; (-) strand; PAM type: NRG; PAM sequence: CAG
taggccgtgtcctcgccacc

SEQ ID NO: 8586 - DNA, 20 bp, Artificial Sequence
  Description of Artificial Sequence: Synthetic oligonucleotide
  Target: ANGPTL4; (-) strand; PAM type: NRG; PAM sequence: AGG
tgcagtgagctgcaggctat

SEQ ID NO: 8587 - DNA, 20 bp, Artificial Sequence
  Description of Artificial Sequence: Synthetic oligonucleotide
  Target: ANGPTL4; (-) strand; PAM type: NRG; PAM sequence: TAG
gtgcagtgagctgcaggcta

SEQ ID NO: 8588 - DNA, 20 bp, Artificial Sequence
  Description of Artificial Sequence: Synthetic oligonucleotide
  Target: ANGPTL4; (-) strand; PAM type: NRG; PAM sequence: AGG
ccacgggtgcagtgagctgc

SEQ ID NO: 8589 - DNA, 20 bp, Artificial Sequence
  Description of Artificial Sequence: Synthetic oligonucleotide
  Target: ANGPTL4; (-) strand; PAM type: NRG; PAM sequence: CAG
gccacgggtgcagtgagctg

SEQ ID NO: 8590 - DNA, 20 bp, Artificial Sequence
  Description of Artificial Sequence: Synthetic oligonucleotide
  Target: ANGPTL4; (-) strand; PAM type: NRG; PAM sequence: GAG
tggccggccacgggtgcagt

SEQ ID NO: 8591 - DNA, 20 bp, Artificial Sequence
  Description of Artificial Sequence: Synthetic oligonucleotide
  Target: ANGPTL4; (-) strand; PAM type: NRG; PAM sequence: CAG
cagctggccggccacgggtg

SEQ ID NO: 8592 - DNA, 20 bp, Artificial Sequence
  Description of Artificial Sequence: Synthetic oligonucleotide
  Target: ANGPTL4; (-) strand; PAM type: NRG; PAM sequence: GGG
gcgcccagctggccggccac

SEQ ID NO: 8593 - DNA, 20 bp, Artificial Sequence
  Description of Artificial Sequence: Synthetic oligonucleotide
  Target: ANGPTL4; (-) strand; PAM type: NRG; PAM sequence: CGG
ggcgcccagctggccggcca

SEQ ID NO: 8594 - DNA, 20 bp, Artificial Sequence
  Description of Artificial Sequence: Synthetic oligonucleotide
  Target: ANGPTL4; (-) strand; PAM type: NRG; PAM sequence: CGG
ggtggtggcgcccagctggc

SEQ ID NO: 8595 - DNA, 20 bp, Artificial Sequence
  Description of Artificial Sequence: Synthetic oligonucleotide
  Target: ANGPTL4; (-) strand; PAM type: NRG; PAM sequence: TGG
ggacggtggtggcgcccagc

SEQ ID NO: 8596 - DNA, 20 bp, Artificial Sequence
  Description of Artificial Sequence: Synthetic oligonucleotide
  Target: ANGPTL4; (-) strand; PAM type: NRG; PAM sequence: CAG
ggtgggacggtggtggcgcc

SEQ ID NO: 8597 - DNA, 20 bp, Artificial Sequence
  Description of Artificial Sequence: Synthetic oligonucleotide
  Target: ANGPTL4; (-) strand; PAM type: NRG; PAM sequence: TGG
gccgctgggtgggacggtgg

SEQ ID NO: 8598 - DNA, 20 bp, Artificial Sequence
  Description of Artificial Sequence: Synthetic oligonucleotide
  Target: ANGPTL4; (-) strand; PAM type: NRG; PAM sequence: TGG
gaggccgctgggtgggacgg

SEQ ID NO: 8599 - DNA, 20 bp, Artificial Sequence
  Description of Artificial Sequence: Synthetic oligonucleotide
  Target: ANGPTL4; (-) strand; PAM type: NRG; PAM sequence: CGG
ggagaggccgctgggtggga

SEQ ID NO: 8600 - DNA, 20 bp, Artificial Sequence
  Description of Artificial Sequence: Synthetic oligonucleotide
  Target: ANGPTL4; (-) strand; PAM type: NRG; PAM sequence: GGG
gtacggagaggccgctgggt

SEQ ID NO: 8601 - DNA, 20 bp, Artificial Sequence
  Description of Artificial Sequence: Synthetic oligonucleotide
  Target: ANGPTL4; (-) strand; PAM type: NRG; PAM sequence: TGG
ggtacggagaggccgctggg

SEQ ID NO: 8602 - DNA, 20 bp, Artificial Sequence
  Description of Artificial Sequence: Synthetic oligonucleotide
  Target: ANGPTL4; (-) strand; PAM type: NRG; PAM sequence: GGG
aagggtacggagaggccgct

SEQ ID NO: 8603 - DNA, 20 bp, Artificial Sequence
  Description of Artificial Sequence: Synthetic oligonucleotide
  Target: ANGPTL4; (-) strand; PAM type: NRG; PAM sequence: TGG
gaagggtacggagaggccgc

SEQ ID NO: 8604 - DNA, 20 bp, Artificial Sequence
  Description of Artificial Sequence: Synthetic oligonucleotide
  Target: ANGPTL4; (-) strand; PAM type: NRG; PAM sequence: AGG
aagtggagaagggtacggag

SEQ ID NO: 8605 - DNA, 20 bp, Artificial Sequence
  Description of Artificial Sequence: Synthetic oligonucleotide
  Target: ANGPTL4; (-) strand; PAM type: NRG; PAM sequence: GAG
caagtggagaagggtacgga

SEQ ID NO: 8606 - DNA, 20 bp, Artificial Sequence
  Description of Artificial Sequence: Synthetic oligonucleotide
  Target: ANGPTL4; (-) strand; PAM type: NRG; PAM sequence: GAG
cccaagtggagaagggtacg

SEQ ID NO: 8607 - DNA, 20 bp, Artificial Sequence
  Description of Artificial Sequence: Synthetic oligonucleotide
  Target: ANGPTL4; (-) strand; PAM type: NRG; PAM sequence: CGG
gtcccaagtggagaagggta

SEQ ID NO: 8608 - DNA, 20 bp, Artificial Sequence
  Description of Artificial Sequence: Synthetic oligonucleotide
  Target: ANGPTL4; (-) strand; PAM type: NRG; PAM sequence: GGG
tcctggtcccaagtggagaa

SEQ ID NO: 8609 - DNA, 20 bp, Artificial Sequence
  Description of Artificial Sequence: Synthetic oligonucleotide
  Target: ANGPTL4; (-) strand; PAM type: NRG; PAM sequence: AGG
atcctggtcccaagtggaga

SEQ ID NO: 8610 - DNA, 20 bp, Artificial Sequence
  Description of Artificial Sequence: Synthetic oligonucleotide
  Target: ANGPTL4; (-) strand; PAM type: NRG; PAM sequence: AAG
gatcctggtcccaagtggag

SEQ ID NO: 8611 - DNA, 20 bp, Artificial Sequence
  Description of Artificial Sequence: Synthetic oligonucleotide
  Target: ANGPTL4; (-) strand; PAM type: NRG; PAM sequence: GAG
cgtgatcctggtcccaagtg

SEQ ID NO: 8612 - DNA, 20 bp, Artificial Sequence
  Description of Artificial Sequence: Synthetic oligonucleotide
  Target: ANGPTL4; (-) strand; PAM type: NRG; PAM sequence: TGG
gtcgtgatcctggtcccaag

SEQ ID NO: 8613 - DNA, 20 bp, Artificial Sequence
  Description of Artificial Sequence: Synthetic oligonucleotide
  Target: ANGPTL4; (-) strand; PAM type: NRG; PAM sequence: AAG
gaggtcgtgatcctggtccc

SEQ ID NO: 8614 - DNA, 20 bp, Artificial Sequence
  Description of Artificial Sequence: Synthetic oligonucleotide
  Target: ANGPTL4; (-) strand; PAM type: NRG; PAM sequence: TGG
ccctgcggaggtcgtgatcc

SEQ ID NO: 8615 - DNA, 20 bp, Artificial Sequence
  Description of Artificial Sequence: Synthetic oligonucleotide
  Target: ANGPTL4; (-) strand; PAM type: NRG; PAM sequence: AGG
cgcagttcttgtccctgcgg

SEQ ID NO: 8616 - DNA, 20 bp, Artificial Sequence
  Description of Artificial Sequence: Synthetic oligonucleotide
  Target: ANGPTL4; (-) strand; PAM type: NRG; PAM sequence: GAG
gcgcagttcttgtccctgcg

SEQ ID NO: 8617 - DNA, 20 bp, Artificial Sequence
  Description of Artificial Sequence: Synthetic oligonucleotide
  Target: ANGPTL4; (-) strand; PAM type: NRG; PAM sequence: CGG
tggcgcagttcttgtccctg

SEQ ID NO: 8618 - DNA, 20 bp, Artificial Sequence
  Description of Artificial Sequence: Synthetic oligonucleotide
  Target: ANGPTL4; (-) strand; PAM type: NRG; PAM sequence: CAG
caccagagaggctcttggcg

SEQ ID NO: 8619 - DNA, 20 bp, Artificial Sequence
  Description of Artificial Sequence: Synthetic oligonucleotide
  Target: ANGPTL4; (-) strand; PAM type: NRG; PAM sequence: TGG
ctgctcaccagagaggctct

SEQ ID NO: 8620 - DNA, 20 bp, Artificial Sequence
  Description of Artificial Sequence: Synthetic oligonucleotide
  Target: ANGPTL4; (-) strand; PAM type: NRG; PAM sequence: AGG
gcagggcctgctcaccagag

SEQ ID NO: 8621 - DNA, 20 bp, Artificial Sequence
  Description of Artificial Sequence: Synthetic oligonucleotide
  Target: ANGPTL4; (-) strand; PAM type: NRG; PAM sequence: GAG
ggcagggcctgctcaccaga

SEQ ID NO: 8622 - DNA, 20 bp, Artificial Sequence
  Description of Artificial Sequence: Synthetic oligonucleotide
  Target: ANGPTL4; (-) strand; PAM type: NRG; PAM sequence: GAG
atggcagggcctgctcacca

SEQ ID NO: 8623 - DNA, 20 bp, Artificial Sequence
  Description of Artificial Sequence: Synthetic oligonucleotide
  Target: ANGPTL4; (-) strand; PAM type: NRG; PAM sequence: CAG
gcatggcagggcctgctcac

SEQ ID NO: 8624 - DNA, 20 bp, Artificial Sequence
  Description of Artificial Sequence: Synthetic oligonucleotide
  Target: ANGPTL4; (-) strand; PAM type: NRG; PAM sequence: GGG
tggctgggtgtggcatggca

SEQ ID NO: 8625 - DNA, 20 bp, Artificial Sequence
  Description of Artificial Sequence: Synthetic oligonucleotide
  Target: ANGPTL4; (-) strand; PAM type: NRG; PAM sequence: AGG
ctggctgggtgtggcatggc

SEQ ID NO: 8626 - DNA, 20 bp, Artificial Sequence
  Description of Artificial Sequence: Synthetic oligonucleotide
  Target: ANGPTL4; (-) strand; PAM type: NRG; PAM sequence: CAG
gctggctgggtgtggcatgg

SEQ ID NO: 8627 - DNA, 20 bp, Artificial Sequence
  Description of Artificial Sequence: Synthetic oligonucleotide
  Target: ANGPTL4; (-) strand; PAM type: NRG; PAM sequence: TGG
gctgctggctgggtgtggca

SEQ ID NO: 8628 - DNA, 20 bp, Artificial Sequence
  Description of Artificial Sequence: Synthetic oligonucleotide
  Target: ANGPTL4; (-) strand; PAM type: NRG; PAM sequence: TGG
gggaagctgctggctgggtg

SEQ ID NO: 8629 - DNA, 20 bp, Artificial Sequence
  Description of Artificial Sequence: Synthetic oligonucleotide
  Target: ANGPTL4; (-) strand; PAM type: NRG; PAM sequence: GGG
aaggagggaagctgctggct

SEQ ID NO: 8630 - DNA, 20 bp, Artificial Sequence
  Description of Artificial Sequence: Synthetic oligonucleotide
  Target: ANGPTL4; (-) strand; PAM type: NRG; PAM sequence: TGG
taaggagggaagctgctggc

SEQ ID NO: 8631 - DNA, 20 bp, Artificial Sequence
  Description of Artificial Sequence: Synthetic oligonucleotide
  Target: ANGPTL4; (-) strand; PAM type: NRG; PAM sequence: TGG
aagataaggagggaagctgc

SEQ ID NO: 8632 - DNA, 20 bp, Artificial Sequence
  Description of Artificial Sequence: Synthetic oligonucleotide
  Target: ANGPTL4; (-) strand; PAM type: NRG; PAM sequence: AAG
cagcagaaagataaggaggg

SEQ ID NO: 8633 - DNA, 20 bp, Artificial Sequence
  Description of Artificial Sequence: Synthetic oligonucleotide
  Target: ANGPTL4; (-) strand; PAM type: NRG; PAM sequence: GGG
gagcagcagaaagataagga

SEQ ID NO: 8634 - DNA, 20 bp, Artificial Sequence
  Description of Artificial Sequence: Synthetic oligonucleotide
  Target: ANGPTL4; (-) strand; PAM type: NRG; PAM sequence: AGG
agagcagcagaaagataagg

SEQ ID NO: 8635 - DNA, 20 bp, Artificial Sequence
  Description of Artificial Sequence: Synthetic oligonucleotide
  Target: ANGPTL4; (-) strand; PAM type: NRG; PAM sequence: GAG
cagagcagcagaaagataag

SEQ ID NO: 8636 - DNA, 20 bp, Artificial Sequence
  Description of Artificial Sequence: Synthetic oligonucleotide
  Target: ANGPTL4; (-) strand; PAM type: NRG; PAM sequence: AGG
gacagagcagcagaaagata

SEQ ID NO: 8637 - DNA, 20 bp, Artificial Sequence
  Description of Artificial Sequence: Synthetic oligonucleotide
  Target: ANGPTL4; (-) strand; PAM type: NRG; PAM sequence: AAG
ggacagagcagcagaaagat

SEQ ID NO: 8638 - DNA, 20 bp, Artificial Sequence
  Description of Artificial Sequence: Synthetic oligonucleotide
  Target: ANGPTL4; (-) strand; PAM type: NRG; PAM sequence: AAG
aggcaggacagagcagcaga

SEQ ID NO: 8639 - DNA, 20 bp, Artificial Sequence
  Description of Artificial Sequence: Synthetic oligonucleotide
  Target: ANGPTL4; (-) strand; PAM type: NRG; PAM sequence: CAG
ttgaaggcaggacagagcag

SEQ ID NO: 8640 - DNA, 20 bp, Artificial Sequence
  Description of Artificial Sequence: Synthetic oligonucleotide
  Target: ANGPTL4; (-) strand; PAM type: NRG; PAM sequence: CAG
gggttgaaggcaggacagag

SEQ ID NO: 8641 - DNA, 20 bp, Artificial Sequence
  Description of Artificial Sequence: Synthetic oligonucleotide
  Target: ANGPTL4; (-) strand; PAM type: NRG; PAM sequence: GAG
gtggggttgaaggcaggaca

SEQ ID NO: 8642 - DNA, 20 bp, Artificial Sequence
  Description of Artificial Sequence: Synthetic oligonucleotide
  Target: ANGPTL4; (-) strand; PAM type: NRG; PAM sequence: CAG
atgtggggttgaaggcagga

SEQ ID NO: 8643 - DNA, 20 bp, Artificial Sequence
  Description of Artificial Sequence: Synthetic oligonucleotide
  Target: ANGPTL4; (-) strand; PAM type: NRG; PAM sequence: AGG
tgcaatgtggggttgaaggc

SEQ ID NO: 8644 - DNA, 20 bp, Artificial Sequence
  Description of Artificial Sequence: Synthetic oligonucleotide
  Target: ANGPTL4; (-) strand; PAM type: NRG; PAM sequence: CAG
atgcaatgtggggttgaagg

SEQ ID NO: 8645 - DNA, 20 bp, Artificial Sequence
  Description of Artificial Sequence: Synthetic oligonucleotide
  Target: ANGPTL4; (-) strand; PAM type: NRG; PAM sequence: AGG
cagatgcaatgtggggttga

SEQ ID NO: 8646 - DNA, 20 bp, Artificial Sequence
  Description of Artificial Sequence: Synthetic oligonucleotide
  Target: ANGPTL4; (-) strand; PAM type: NRG; PAM sequence: AAG
acagatgcaatgtggggttg

SEQ ID NO: 8647 - DNA, 20 bp, Artificial Sequence
  Description of Artificial Sequence: Synthetic oligonucleotide
  Target: ANGPTL4; (-) strand; PAM type: NRG; PAM sequence: GGG
caggaaacagatgcaatgtg

SEQ ID NO: 8648 - DNA, 20 bp, Artificial Sequence
  Description of Artificial Sequence: Synthetic oligonucleotide
  Target: ANGPTL4; (-) strand; PAM type: NRG; PAM sequence: GGG
gcaggaaacagatgcaatgt

SEQ ID NO: 8649 - DNA, 20 bp, Artificial Sequence
  Description of Artificial Sequence: Synthetic oligonucleotide
  Target: ANGPTL4; (-) strand; PAM type: NRG; PAM sequence: TGG
ggcaggaaacagatgcaatg

SEQ ID NO: 8650 - DNA, 20 bp, Artificial Sequence
  Description of Artificial Sequence: Synthetic oligonucleotide
  Target: ANGPTL4; (-) strand; PAM type: NRG; PAM sequence: CAG
gaagaggtgggggcaggaaa

SEQ ID NO: 8651 - DNA, 20 bp, Artificial Sequence
  Description of Artificial Sequence: Synthetic oligonucleotide
  Target: ANGPTL4; (-) strand; PAM type: NRG; PAM sequence: AGG
tgtaaggaagaggtgggggc

SEQ ID NO: 8652 - DNA, 20 bp, Artificial Sequence
  Description of Artificial Sequence: Synthetic oligonucleotide
  Target: ANGPTL4; (-) strand; PAM type: NRG; PAM sequence: CAG
atgtaaggaagaggtggggg

SEQ ID NO: 8653 - DNA, 20 bp, Artificial Sequence
  Description of Artificial Sequence: Synthetic oligonucleotide
  Target: ANGPTL4; (-) strand; PAM type: NRG; PAM sequence: GGG
ggcatgtaaggaagaggtgg

SEQ ID NO: 8654 - DNA, 20 bp, Artificial Sequence
  Description of Artificial Sequence: Synthetic oligonucleotide
  Target: ANGPTL4; (-) strand; PAM type: NRG; PAM sequence: GGG
cggcatgtaaggaagaggtg

SEQ ID NO: 8655 - DNA, 20 bp, Artificial Sequence
  Description of Artificial Sequence: Synthetic oligonucleotide
  Target: ANGPTL4; (-) strand; PAM type: NRG; PAM sequence: GGG
acggcatgtaaggaagaggt

SEQ ID NO: 8656 - DNA, 20 bp, Artificial Sequence
  Description of Artificial Sequence: Synthetic oligonucleotide
  Target: ANGPTL4; (-) strand; PAM type: NRG; PAM sequence: TGG
cacggcatgtaaggaagagg

SEQ ID NO: 8657 - DNA, 20 bp, Artificial Sequence
  Description of Artificial Sequence: Synthetic oligonucleotide
  Target: ANGPTL4; (-) strand; PAM type: NRG; PAM sequence: AGG
acacacggcatgtaaggaag

SEQ ID NO: 8658 - DNA, 20 bp, Artificial Sequence
  Description of Artificial Sequence: Synthetic oligonucleotide
  Target: ANGPTL4; (-) strand; PAM type: NRG; PAM sequence: GAG
cacacacggcatgtaaggaa

SEQ ID NO: 8659 - DNA, 20 bp, Artificial Sequence
  Description of Artificial Sequence: Synthetic oligonucleotide
  Target: ANGPTL4; (-) strand; PAM type: NRG; PAM sequence: AAG
cacacacacggcatgtaagg

SEQ ID NO: 8660 - DNA, 20 bp, Artificial Sequence
  Description of Artificial Sequence: Synthetic oligonucleotide
  Target: ANGPTL4; (-) strand; PAM type: NRG; PAM sequence: AGG
aatcacacacacggcatgta

SEQ ID NO: 8661 - DNA, 20 bp, Artificial Sequence
  Description of Artificial Sequence: Synthetic oligonucleotide
  Target: ANGPTL4; (-) strand; PAM type: NRG; PAM sequence: AAG
caatcacacacacggcatgt

SEQ ID NO: 8662 - DNA, 20 bp, Artificial Sequence
  Description of Artificial Sequence: Synthetic oligonucleotide
  Target: ANGPTL4; (-) strand; PAM type: NRG; PAM sequence: CGG
tagtggcccaatcacacaca

SEQ ID NO: 8663 - DNA, 20 bp, Artificial Sequence
  Description of Artificial Sequence: Synthetic oligonucleotide
  Target: ANGPTL4; (-) strand; PAM type: NRG; PAM sequence: TGG
ggccagataggctaagttag

SEQ ID NO: 8664 - DNA, 20 bp, Artificial Sequence
  Description of Artificial Sequence: Synthetic oligonucleotide
  Target: ANGPTL4; (-) strand; PAM type: NRG; PAM sequence: TAG
tgaggccagataggctaagt

SEQ ID NO: 8665 - DNA, 20 bp, Artificial Sequence
  Description of Artificial Sequence: Synthetic oligonucleotide
  Target: ANGPTL4; (-) strand; PAM type: NRG; PAM sequence: AAG
aaactgaggccagataggct

SEQ ID NO: 8666 - DNA, 20 bp, Artificial Sequence
  Description of Artificial Sequence: Synthetic oligonucleotide
  Target: ANGPTL4; (-) strand; PAM type: NRG; PAM sequence: AGG
tgggaaaactgaggccagat

SEQ ID NO: 8667 - DNA, 20 bp, Artificial Sequence
  Description of Artificial Sequence: Synthetic oligonucleotide
  Target: ANGPTL4; (-) strand; PAM type: NRG; PAM sequence: TAG
atgggaaaactgaggccaga

SEQ ID NO: 8668 - DNA, 20 bp, Artificial Sequence
  Description of Artificial Sequence: Synthetic oligonucleotide
  Target: ANGPTL4; (-) strand; PAM type: NRG; PAM sequence: CAG
caggatgggaaaactgaggc

SEQ ID NO: 8669 - DNA, 20 bp, Artificial Sequence
  Description of Artificial Sequence: Synthetic oligonucleotide
  Target: ANGPTL4; (-) strand; PAM type: NRG; PAM sequence: AGG
ttttcaggatgggaaaactg

SEQ ID NO: 8670 - DNA, 20 bp, Artificial Sequence
  Description of Artificial Sequence: Synthetic oligonucleotide
  Target: ANGPTL4; (-) strand; PAM type: NRG; PAM sequence: GAG
cttttcaggatgggaaaact

SEQ ID NO: 8671 - DNA, 20 bp, Artificial Sequence
  Description of Artificial Sequence: Synthetic oligonucleotide
  Target: ANGPTL4; (-) strand; PAM type: NRG; PAM sequence: GGG
gtcaagacccttttcaggat

SEQ ID NO: 8672 - DNA, 20 bp, Artificial Sequence
  Description of Artificial Sequence: Synthetic oligonucleotide
  Target: ANGPTL4; (-) strand; PAM type: NRG; PAM sequence: TGG
ggtcaagacccttttcagga

SEQ ID NO: 8673 - DNA, 20 bp, Artificial Sequence
  Description of Artificial Sequence: Synthetic oligonucleotide
  Target: ANGPTL4; (-) strand; PAM type: NRG; PAM sequence: AGG
agacggtcaagacccttttc

SEQ ID NO: 8674 - DNA, 20 bp, Artificial Sequence
  Description of Artificial Sequence: Synthetic oligonucleotide
  Target: ANGPTL4; (-) strand; PAM type: NRG; PAM sequence: CAG
aagacggtcaagaccctttt

SEQ ID NO: 8675 - DNA, 20 bp, Artificial Sequence
  Description of Artificial Sequence: Synthetic oligonucleotide
  Target: ANGPTL4; (-) strand; PAM type: NRG; PAM sequence: AAG
aaataaaagtaaagacggtc

SEQ ID NO: 8676 - DNA, 20 bp, Artificial Sequence
  Description of Artificial Sequence: Synthetic oligonucleotide
  Target: ANGPTL4; (-) strand; PAM type: NRG; PAM sequence: CGG
taagtaaataaaagtaaaga

SEQ ID NO: 8677 - DNA, 20 bp, Artificial Sequence
  Description of Artificial Sequence: Synthetic oligonucleotide
  Target: ANGPTL4; (-) strand; PAM type: NRG; PAM sequence: AAG
cacataagtaaataaaagta

SEQ ID NO: 8678 - DNA, 20 bp, Artificial Sequence
  Description of Artificial Sequence: Synthetic oligonucleotide
  Target: ANGPTL4; (-) strand; PAM type: NRG; PAM sequence: AAG
acaaacacataagtaaataa

SEQ ID NO: 8679 - DNA, 20 bp, Artificial Sequence
  Description of Artificial Sequence: Synthetic oligonucleotide
  Target: ANGPTL4; (-) strand; PAM type: NRG; PAM sequence: AAG
aaataaataaacaaacacat

SEQ ID NO: 8680 - DNA, 20 bp, Artificial Sequence
  Description of Artificial Sequence: Synthetic oligonucleotide
  Target: ANGPTL4; (-) strand; PAM type: NRG; PAM sequence: GAG
tccagcctgggtgacaaagt

SEQ ID NO: 8681 - DNA, 20 bp, Artificial Sequence
  Description of Artificial Sequence: Synthetic oligonucleotide
  Target: ANGPTL4; (-) strand; PAM type: NRG; PAM sequence: AAG
gcactccagcctgggtgaca

SEQ ID NO: 8682 - DNA, 20 bp, Artificial Sequence
  Description of Artificial Sequence: Synthetic oligonucleotide
  Target: ANGPTL4; (-) strand; PAM type: NRG; PAM sequence: GGG
gccacaaagcactccagcct

SEQ ID NO: 8683 - DNA, 20 bp, Artificial Sequence
  Description of Artificial Sequence: Synthetic oligonucleotide
  Target: ANGPTL4; (-) strand; PAM type: NRG; PAM sequence: TGG
tgccacaaagcactccagcc

SEQ ID NO: 8684 - DNA, 20 bp, Artificial Sequence
  Description of Artificial Sequence: Synthetic oligonucleotide
  Target: ANGPTL4; (-) strand; PAM type: NRG; PAM sequence: CAG
gatcgtgccacaaagcactc

SEQ ID NO: 8685 - DNA, 20 bp, Artificial Sequence
  Description of Artificial Sequence: Synthetic oligonucleotide
  Target: ANGPTL4; (-) strand; PAM type: NRG; PAM sequence: AAG
tgagccaagatcgtgccaca

SEQ ID NO: 8686 - DNA, 20 bp, Artificial Sequence
  Description of Artificial Sequence: Synthetic oligonucleotide
  Target: ANGPTL4; (-) strand; PAM type: NRG; PAM sequence: AAG
ggtggagcttgcagtgagcc

SEQ ID NO: 8687 - DNA, 20 bp, Artificial Sequence
  Description of Artificial Sequence: Synthetic oligonucleotide
  Target: ANGPTL4; (-) strand; PAM type: NRG; PAM sequence: GAG
caggaggtggagcttgcagt

SEQ ID NO: 8688 - DNA, 20 bp, Artificial Sequence
  Description of Artificial Sequence: Synthetic oligonucleotide
  Target: ANGPTL4; (-) strand; PAM type: NRG; PAM sequence: CAG
aactcaggaggtggagcttg

SEQ ID NO: 8689 - DNA, 20 bp, Artificial Sequence
  Description of Artificial Sequence: Synthetic oligonucleotide
  Target: ANGPTL4; (-) strand; PAM type: NRG; PAM sequence: GAG
tggtgtgaactcaggaggtg

SEQ ID NO: 8690 - DNA, 20 bp, Artificial Sequence
  Description of Artificial Sequence: Synthetic oligonucleotide
  Target: ANGPTL4; (-) strand; PAM type: NRG; PAM sequence: TGG
aatggtgtgaactcaggagg

SEQ ID NO: 8691 - DNA, 20 bp, Artificial Sequence
  Description of Artificial Sequence: Synthetic oligonucleotide
  Target: ANGPTL4; (-) strand; PAM type: NRG; PAM sequence: AGG
gagaatggtgtgaactcagg

SEQ ID NO: 8692 - DNA, 20 bp, Artificial Sequence
  Description of Artificial Sequence: Synthetic oligonucleotide
  Target: ANGPTL4; (-) strand; PAM type: NRG; PAM sequence: GAG
ggagaatggtgtgaactcag

SEQ ID NO: 8693 - DNA, 20 bp, Artificial Sequence
  Description of Artificial Sequence: Synthetic oligonucleotide
  Target: ANGPTL4; (-) strand; PAM type: NRG; PAM sequence: AGG
caggagaatggtgtgaactc

SEQ ID NO: 8694 - DNA, 20 bp, Artificial Sequence
  Description of Artificial Sequence: Synthetic oligonucleotide
  Target: ANGPTL4; (-) strand; PAM type: NRG; PAM sequence: CAG
gcaggagaatggtgtgaact

SEQ ID NO: 8695 - DNA, 20 bp, Artificial Sequence
  Description of Artificial Sequence: Synthetic oligonucleotide
  Target: ANGPTL4; (-) strand; PAM type: NRG; PAM sequence: TGG
gggaggctgaggcaggagaa

SEQ ID NO: 8696 - DNA, 20 bp, Artificial Sequence
  Description of Artificial Sequence: Synthetic oligonucleotide
  Target: ANGPTL4; (-) strand; PAM type: NRG; PAM sequence: GAG
tactcgggaggctgaggcag

SEQ ID NO: 8697 - DNA, 20 bp, Artificial Sequence
  Description of Artificial Sequence: Synthetic oligonucleotide
  Target: ANGPTL4; (-) strand; PAM type: NRG; PAM sequence: AGG
gctactcgggaggctgaggc

SEQ ID NO: 8698 - DNA, 20 bp, Artificial Sequence
  Description of Artificial Sequence: Synthetic oligonucleotide
  Target: ANGPTL4; (-) strand; PAM type: NRG; PAM sequence: CAG
agctactcgggaggctgagg

SEQ ID NO: 8699 - DNA, 20 bp, Artificial Sequence
  Description of Artificial Sequence: Synthetic oligonucleotide
  Target: ANGPTL4; (-) strand; PAM type: NRG; PAM sequence: AGG
cccagctactcgggaggctg

SEQ ID NO: 8700 - DNA, 20 bp, Artificial Sequence
  Description of Artificial Sequence: Synthetic oligonucleotide
  Target: ANGPTL4; (-) strand; PAM type: NRG; PAM sequence: GAG
tcccagctactcgggaggct

SEQ ID NO: 8701 - DNA, 20 bp, Artificial Sequence
  Description of Artificial Sequence: Synthetic oligonucleotide
  Target: ANGPTL4; (-) strand; PAM type: NRG; PAM sequence: AGG
tatagtcccagctactcggg

SEQ ID NO: 8702 - DNA, 20 bp, Artificial Sequence
  Description of Artificial Sequence: Synthetic oligonucleotide
  Target: ANGPTL4; (-) strand; PAM type: NRG; PAM sequence: GAG
ctatagtcccagctactcgg

SEQ ID NO: 8703 - DNA, 20 bp, Artificial Sequence
  Description of Artificial Sequence: Synthetic oligonucleotide
  Target: ANGPTL4; (-) strand; PAM type: NRG; PAM sequence: GGG
acctatagtcccagctactc

SEQ ID NO: 8704 - DNA, 20 bp, Artificial Sequence
  Description of Artificial Sequence: Synthetic oligonucleotide
  Target: ANGPTL4; (-) strand; PAM type: NRG; PAM sequence: CGG
cacctatagtcccagctact

SEQ ID NO: 8705 - DNA, 20 bp, Artificial Sequence
  Description of Artificial Sequence: Synthetic oligonucleotide
  Target: ANGPTL4; (-) strand; PAM type: NRG; PAM sequence: CAG
gtggtgggcacctatagtcc

SEQ ID NO: 8706 - DNA, 20 bp, Artificial Sequence
  Description of Artificial Sequence: Synthetic oligonucleotide
  Target: ANGPTL4; (-) strand; PAM type: NRG; PAM sequence: TAG
ggcgtggtggtgggcaccta

SEQ ID NO: 8707 - DNA, 20 bp, Artificial Sequence
  Description of Artificial Sequence: Synthetic oligonucleotide
  Target: ANGPTL4; (-) strand; PAM type: NRG; PAM sequence: GGG
aattagccaggcgtggtggt

SEQ ID NO: 8708 - DNA, 20 bp, Artificial Sequence
  Description of Artificial Sequence: Synthetic oligonucleotide
  Target: ANGPTL4; (-) strand; PAM type: NRG; PAM sequence: TGG
aaattagccaggcgtggtgg

SEQ ID NO: 8709 - DNA, 20 bp, Artificial Sequence
  Description of Artificial Sequence: Synthetic oligonucleotide
  Target: ANGPTL4; (-) strand; PAM type: NRG; PAM sequence: TGG
aaaaaattagccaggcgtgg

SEQ ID NO: 8710 - DNA, 20 bp, Artificial Sequence
  Description of Artificial Sequence: Synthetic oligonucleotide
  Target: ANGPTL4; (-) strand; PAM type: NRG; PAM sequence: TGG
acaaaaaaattagccaggcg

SEQ ID NO: 8711 - DNA, 20 bp, Artificial Sequence
  Description of Artificial Sequence: Synthetic oligonucleotide
  Target: ANGPTL4; (-) strand; PAM type: NRG; PAM sequence: AGG
aaaatacaaaaaaattagcc

SEQ ID NO: 8712 - DNA, 20 bp, Artificial Sequence
  Description of Artificial Sequence: Synthetic oligonucleotide
  Target: ANGPTL4; (-) strand; PAM type: NRG; PAM sequence: CAG
aaaaatacaaaaaaattagc

SEQ ID NO: 8713 - DNA, 20 bp, Artificial Sequence
  Description of Artificial Sequence: Synthetic oligonucleotide
  Target: ANGPTL4; (-) strand; PAM type: NRG; PAM sequence: TAG
tactaaaaatacaaaaaaat

SEQ ID NO: 8714 - DNA, 20 bp, Artificial Sequence
  Description of Artificial Sequence: Synthetic oligonucleotide
  Target: ANGPTL4; (-) strand; PAM type: NRG; PAM sequence: CGG
cgagaccatcctggctaaca

SEQ ID NO: 8715 - DNA, 20 bp, Artificial Sequence
  Description of Artificial Sequence: Synthetic oligonucleotide
  Target: ANGPTL4; (-) strand; PAM type: NRG; PAM sequence: TGG
tcaggagatcgagaccatcc

SEQ ID NO: 8716 - DNA, 20 bp, Artificial Sequence
  Description of Artificial Sequence: Synthetic oligonucleotide
  Target: ANGPTL4; (-) strand; PAM type: NRG; PAM sequence: GAG
gatcacgaggtcaggagatc

SEQ ID NO: 8717 - DNA, 20 bp, Artificial Sequence
  Description of Artificial Sequence: Synthetic oligonucleotide
  Target: ANGPTL4; (-) strand; PAM type: NRG; PAM sequence: GAG
caggcagatcacgaggtcag

SEQ ID NO: 8718 - DNA, 20 bp, Artificial Sequence
  Description of Artificial Sequence: Synthetic oligonucleotide
  Target: ANGPTL4; (-) strand; PAM type: NRG; PAM sequence: AGG
ggcaggcagatcacgaggtc

SEQ ID NO: 8719 - DNA, 20 bp, Artificial Sequence
  Description of Artificial Sequence: Synthetic oligonucleotide
  Target: ANGPTL4; (-) strand; PAM type: NRG; PAM sequence: CAG
aggcaggcagatcacgaggt

SEQ ID NO: 8720 - DNA, 20 bp, Artificial Sequence
  Description of Artificial Sequence: Synthetic oligonucleotide
  Target: ANGPTL4; (-) strand; PAM type: NRG; PAM sequence: AGG
gctgaggcaggcagatcacg

SEQ ID NO: 8721 - DNA, 20 bp, Artificial Sequence
  Description of Artificial Sequence: Synthetic oligonucleotide
  Target: ANGPTL4; (-) strand; PAM type: NRG; PAM sequence: GAG
ggctgaggcaggcagatcac

SEQ ID NO: 8722 - DNA, 20 bp, Artificial Sequence
  Description of Artificial Sequence: Synthetic oligonucleotide
  Target: ANGPTL4; (-) strand; PAM type: NRG; PAM sequence: CAG
ctttgggaggctgaggcagg

SEQ ID NO: 8723 - DNA, 20 bp, Artificial Sequence
  Description of Artificial Sequence: Synthetic oligonucleotide
  Target: ANGPTL4; (-) strand; PAM type: NRG; PAM sequence: AGG
gcactttgggaggctgaggc

SEQ ID NO: 8724 - DNA, 20 bp, Artificial Sequence
  Description of Artificial Sequence: Synthetic oligonucleotide
  Target: ANGPTL4; (-) strand; PAM type: NRG; PAM sequence: CAG
agcactttgggaggctgagg

SEQ ID NO: 8725 - DNA, 20 bp, Artificial Sequence
  Description of Artificial Sequence: Synthetic oligonucleotide
  Target: ANGPTL4; (-) strand; PAM type: NRG; PAM sequence: AGG
cccagcactttgggaggctg

SEQ ID NO: 8726 - DNA, 20 bp, Artificial Sequence
  Description of Artificial Sequence: Synthetic oligonucleotide
  Target: ANGPTL4; (-) strand; PAM type: NRG; PAM sequence: GAG
tcccagcactttgggaggct

SEQ ID NO: 8727 - DNA, 20 bp, Artificial Sequence
  Description of Artificial Sequence: Synthetic oligonucleotide
  Target: ANGPTL4; (-) strand; PAM type: NRG; PAM sequence: AGG
tgtaatcccagcactttggg

SEQ ID NO: 8728 - DNA, 20 bp, Artificial Sequence
  Description of Artificial Sequence: Synthetic oligonucleotide
  Target: ANGPTL4; (-) strand; PAM type: NRG; PAM sequence: GAG
ctgtaatcccagcactttgg

SEQ ID NO: 8729 - DNA, 20 bp, Artificial Sequence
  Description of Artificial Sequence: Synthetic oligonucleotide
  Target: ANGPTL4; (-) strand; PAM type: NRG; PAM sequence: GGG
gcctgtaatcccagcacttt

SEQ ID NO: 8730 - DNA, 20 bp, Artificial Sequence
  Description of Artificial Sequence: Synthetic oligonucleotide
  Target: ANGPTL4; (-) strand; PAM type: NRG; PAM sequence: TGG
cgcctgtaatcccagcactt

SEQ ID NO: 8731 - DNA, 20 bp, Artificial Sequence
  Description of Artificial Sequence: Synthetic oligonucleotide
  Target: ANGPTL4; (-) strand; PAM type: NRG; PAM sequence: CAG
gtggctcacgcctgtaatcc

SEQ ID NO: 8732 - DNA, 20 bp, Artificial Sequence
  Description of Artificial Sequence: Synthetic oligonucleotide
  Target: ANGPTL4; (-) strand; PAM type: NRG; PAM sequence: TGG
aataagtaggccgggcgcgg

SEQ ID NO: 8733 - DNA, 20 bp, Artificial Sequence
  Description of Artificial Sequence: Synthetic oligonucleotide
  Target: ANGPTL4; (-) strand; PAM type: NRG; PAM sequence: CGG
ataaataagtaggccgggcg

SEQ ID NO: 8734 - DNA, 20 bp, Artificial Sequence
  Description of Artificial Sequence: Synthetic oligonucleotide
  Target: ANGPTL4; (-) strand; PAM type: NRG; PAM sequence: GGG
aaaaaataaataagtaggcc

SEQ ID NO: 8735 - DNA, 20 bp, Artificial Sequence
  Description of Artificial Sequence: Synthetic oligonucleotide
  Target: ANGPTL4; (-) strand; PAM type: NRG; PAM sequence: CGG
caaaaaataaataagtaggc

SEQ ID NO: 8736 - DNA, 20 bp, Artificial Sequence
  Description of Artificial Sequence: Synthetic oligonucleotide
  Target: ANGPTL4; (-) strand; PAM type: NRG; PAM sequence: AGG
gtctcaaaaaataaataagt

SEQ ID NO: 8737 - DNA, 20 bp, Artificial Sequence
  Description of Artificial Sequence: Synthetic oligonucleotide
  Target: ANGPTL4; (-) strand; PAM type: NRG; PAM sequence: TAG
tgtctcaaaaaataaataag

SEQ ID NO: 8738 - DNA, 20 bp, Artificial Sequence
  Description of Artificial Sequence: Synthetic oligonucleotide
  Target: ANGPTL4; (-) strand; PAM type: NRG; PAM sequence: AAG
ctctgtctcaaaaaataaat

SEQ ID NO: 8739 - DNA, 20 bp, Artificial Sequence
  Description of Artificial Sequence: Synthetic oligonucleotide
  Target: ANGPTL4; (-) strand; PAM type: NRG; PAM sequence: GGG
tccagcctgggagacacagc

SEQ ID NO: 8740 - DNA, 20 bp, Artificial Sequence
  Description of Artificial Sequence: Synthetic oligonucleotide
  Target: ANGPTL4; (-) strand; PAM type: NRG; PAM sequence: CGG
ctccagcctgggagacacag

SEQ ID NO: 8741 - DNA, 20 bp, Artificial Sequence
  Description of Artificial Sequence: Synthetic oligonucleotide
  Target: ANGPTL4; (-) strand; PAM type: NRG; PAM sequence: CAG
gcactccagcctgggagaca

SEQ ID NO: 8742 - DNA, 20 bp, Artificial Sequence
  Description of Artificial Sequence: Synthetic oligonucleotide
  Target: ANGPTL4; (-) strand; PAM type: NRG; PAM sequence: GAG
tcacttgcactccagcctgg

SEQ ID NO: 8743 - DNA, 20 bp, Artificial Sequence
  Description of Artificial Sequence: Synthetic oligonucleotide
  Target: ANGPTL4; (-) strand; PAM type: NRG; PAM sequence: GGG
cgtcacttgcactccagcct

SEQ ID NO: 8744 - DNA, 20 bp, Artificial Sequence
  Description of Artificial Sequence: Synthetic oligonucleotide
  Target: ANGPTL4; (-) strand; PAM type: NRG; PAM sequence: TGG
acgtcacttgcactccagcc

SEQ ID NO: 8745 - DNA, 20 bp, Artificial Sequence
  Description of Artificial Sequence: Synthetic oligonucleotide
  Target: ANGPTL4; (-) strand; PAM type: NRG; PAM sequence: CAG
agatcacgtcacttgcactc

SEQ ID NO: 8746 - DNA, 20 bp, Artificial Sequence
  Description of Artificial Sequence: Synthetic oligonucleotide
  Target: ANGPTL4; (-) strand; PAM type: NRG; PAM sequence: AAG
ggcggaggctgcagtgagcc

SEQ ID NO: 8747 - DNA, 20 bp, Artificial Sequence
  Description of Artificial Sequence: Synthetic oligonucleotide
  Target: ANGPTL4; (-) strand; PAM type: NRG; PAM sequence: GAG
caggaggcggaggctgcagt

SEQ ID NO: 8748 - DNA, 20 bp, Artificial Sequence
  Description of Artificial Sequence: Synthetic oligonucleotide
  Target: ANGPTL4; (-) strand; PAM type: NRG; PAM sequence: CAG
aacccaggaggcggaggctg

SEQ ID NO: 8749 - DNA, 20 bp, Artificial Sequence
  Description of Artificial Sequence: Synthetic oligonucleotide
  Target: ANGPTL4; (-) strand; PAM type: NRG; PAM sequence: AGG
cacttgaacccaggaggcgg

SEQ ID NO: 8750 - DNA, 20 bp, Artificial Sequence
  Description of Artificial Sequence: Synthetic oligonucleotide
  Target: ANGPTL4; (-) strand; PAM type: NRG; PAM sequence: GAG
tcacttgaacccaggaggcg

SEQ ID NO: 8751 - DNA, 20 bp, Artificial Sequence
  Description of Artificial Sequence: Synthetic oligonucleotide
  Target: ANGPTL4; (-) strand; PAM type: NRG; PAM sequence: CGG
aatcacttgaacccaggagg

SEQ ID NO: 8752 - DNA, 20 bp, Artificial Sequence
  Description of Artificial Sequence: Synthetic oligonucleotide
  Target: ANGPTL4; (-) strand; PAM type: NRG; PAM sequence: AGG
gagaatcacttgaacccagg

SEQ ID NO: 8753 - DNA, 20 bp, Artificial Sequence
  Description of Artificial Sequence: Synthetic oligonucleotide
  Target: ANGPTL4; (-) strand; PAM type: NRG; PAM sequence: GAG
ggagaatcacttgaacccag

SEQ ID NO: 8754 - DNA, 20 bp, Artificial Sequence
  Description of Artificial Sequence: Synthetic oligonucleotide
  Target: ANGPTL4; (-) strand; PAM type: NRG; PAM sequence: AGG
caggagaatcacttgaaccc

SEQ ID NO: 8755 - DNA, 20 bp, Artificial Sequence
  Description of Artificial Sequence: Synthetic oligonucleotide
  Target: ANGPTL4; (-) strand; PAM type: NRG; PAM sequence: CAG
gcaggagaatcacttgaacc

SEQ ID NO: 8756 - DNA, 20 bp, Artificial Sequence
  Description of Artificial Sequence: Synthetic oligonucleotide
  Target: ANGPTL4; (-) strand; PAM type: NRG; PAM sequence: GAG
tactcaggaggctgaggcag

SEQ ID NO: 8757 - DNA, 20 bp, Artificial Sequence
  Description of Artificial Sequence: Synthetic oligonucleotide
  Target: ANGPTL4; (-) strand; PAM type: NRG; PAM sequence: AGG
gctactcaggaggctgaggc

SEQ ID NO: 8758 - DNA, 20 bp, Artificial Sequence
  Description of Artificial Sequence: Synthetic oligonucleotide
  Target: ANGPTL4; (-) strand; PAM type: NRG; PAM sequence: CAG
agctactcaggaggctgagg

SEQ ID NO: 8759 - DNA, 20 bp, Artificial Sequence
  Description of Artificial Sequence: Synthetic oligonucleotide
  Target: ANGPTL4; (-) strand; PAM type: NRG; PAM sequence: AGG
cccagctactcaggaggctg

SEQ ID NO: 8760 - DNA, 20 bp, Artificial Sequence
  Description of Artificial Sequence: Synthetic oligonucleotide
  Target: ANGPTL4; (-) strand; PAM type: NRG; PAM sequence: GAG
tcccagctactcaggaggct

SEQ ID NO: 8761 - DNA, 20 bp, Artificial Sequence
  Description of Artificial Sequence: Synthetic oligonucleotide
  Target: ANGPTL4; (-) strand; PAM type: NRG; PAM sequence: AGG
tgtaatcccagctactcagg

SEQ ID NO: 8762 - DNA, 20 bp, Artificial Sequence
  Description of Artificial Sequence: Synthetic oligonucleotide
  Target: ANGPTL4; (-) strand; PAM type: NRG; PAM sequence: GAG
ctgtaatcccagctactcag

SEQ ID NO: 8763 - DNA, 20 bp, Artificial Sequence
  Description of Artificial Sequence: Synthetic oligonucleotide
  Target: ANGPTL4; (-) strand; PAM type: NRG; PAM sequence: AGG
acctgtaatcccagctactc

SEQ ID NO: 8764 - DNA, 20 bp, Artificial Sequence
  Description of Artificial Sequence: Synthetic oligonucleotide
  Target: ANGPTL4; (-) strand; PAM type: NRG; PAM sequence: CAG
aacctgtaatcccagctact

SEQ ID NO: 8765 - DNA, 20 bp, Artificial Sequence
  Description of Artificial Sequence: Synthetic oligonucleotide
  Target: ANGPTL4; (-) strand; PAM type: NRG; PAM sequence: CAG
gtggcgggaacctgtaatcc

SEQ ID NO: 8766 - DNA, 20 bp, Artificial Sequence
  Description of Artificial Sequence: Synthetic oligonucleotide
  Target: ANGPTL4; (-) strand; PAM type: NRG; PAM sequence: GGG
aattatctgtgcatggtggc

SEQ ID NO: 8767 - DNA, 20 bp, Artificial Sequence
  Description of Artificial Sequence: Synthetic oligonucleotide
  Target: ANGPTL4; (-) strand; PAM type: NRG; PAM sequence: CGG
caattatctgtgcatggtgg

SEQ ID NO: 8768 - DNA, 20 bp, Artificial Sequence
  Description of Artificial Sequence: Synthetic oligonucleotide
  Target: ANGPTL4; (-) strand; PAM type: NRG; PAM sequence: TGG
aaacaattatctgtgcatgg

SEQ ID NO: 8769 - DNA, 20 bp, Artificial Sequence
  Description of Artificial Sequence: Synthetic oligonucleotide
  Target: ANGPTL4; (-) strand; PAM type: NRG; PAM sequence: TGG
acaaaacaattatctgtgca

SEQ ID NO: 8770 - DNA, 20 bp, Artificial Sequence
  Description of Artificial Sequence: Synthetic oligonucleotide
  Target: ANGPTL4; (-) strand; PAM type: NRG; PAM sequence: TGG
caagaccaccctggccaaca

SEQ ID NO: 8771 - DNA, 20 bp, Artificial Sequence
  Description of Artificial Sequence: Synthetic oligonucleotide
  Target: ANGPTL4; (-) strand; PAM type: NRG; PAM sequence: TGG
tcaggagttcaagaccaccc

SEQ ID NO: 8772 - DNA, 20 bp, Artificial Sequence
  Description of Artificial Sequence: Synthetic oligonucleotide
  Target: ANGPTL4; (-) strand; PAM type: NRG; PAM sequence: AAG
tcacttgaggtcaggagttc

SEQ ID NO: 8773 - DNA, 20 bp, Artificial Sequence
  Description of Artificial Sequence: Synthetic oligonucleotide
  Target: ANGPTL4; (-) strand; PAM type: NRG; PAM sequence: GAG
ggcagatcacttgaggtcag

SEQ ID NO: 8774 - DNA, 20 bp, Artificial Sequence
  Description of Artificial Sequence: Synthetic oligonucleotide
  Target: ANGPTL4; (-) strand; PAM type: NRG; PAM sequence: AGG
tgggcagatcacttgaggtc

SEQ ID NO: 8775 - DNA, 20 bp, Artificial Sequence
  Description of Artificial Sequence: Synthetic oligonucleotide
  Target: ANGPTL4; (-) strand; PAM type: NRG; PAM sequence: CAG
gtgggcagatcacttgaggt

SEQ ID NO: 8776 - DNA, 20 bp, Artificial Sequence
  Description of Artificial Sequence: Synthetic oligonucleotide
  Target: ANGPTL4; (-) strand; PAM type: NRG; PAM sequence: AGG
cgaggtgggcagatcacttg

SEQ ID NO: 8777 - DNA, 20 bp, Artificial Sequence
  Description of Artificial Sequence: Synthetic oligonucleotide
  Target: ANGPTL4; (-) strand; PAM type: NRG; PAM sequence: GAG
ccgaggtgggcagatcactt

SEQ ID NO: 8778 - DNA, 20 bp, Artificial Sequence
  Description of Artificial Sequence: Synthetic oligonucleotide
  Target: ANGPTL4; (-) strand; PAM type: NRG; PAM sequence: CAG
ctttgggaggccgaggtggg

SEQ ID NO: 8779 - DNA, 20 bp, Artificial Sequence
  Description of Artificial Sequence: Synthetic oligonucleotide
  Target: ANGPTL4; (-) strand; PAM type: NRG; PAM sequence: GGG
acactttgggaggccgaggt

SEQ ID NO: 8780 - DNA, 20 bp, Artificial Sequence
  Description of Artificial Sequence: Synthetic oligonucleotide
  Target: ANGPTL4; (-) strand; PAM type: NRG; PAM sequence: TGG
aacactttgggaggccgagg

SEQ ID NO: 8781 - DNA, 20 bp, Artificial Sequence
  Description of Artificial Sequence: Synthetic oligonucleotide
  Target: ANGPTL4; (-) strand; PAM type: NRG; PAM sequence: AGG
cccaacactttgggaggccg

SEQ ID NO: 8782 - DNA, 20 bp, Artificial Sequence
  Description of Artificial Sequence: Synthetic oligonucleotide
  Target: ANGPTL4; (-) strand; PAM type: NRG; PAM sequence: GAG
tcccaacactttgggaggcc

SEQ ID NO: 8783 - DNA, 20 bp, Artificial Sequence
  Description of Artificial Sequence: Synthetic oligonucleotide
  Target: ANGPTL4; (-) strand; PAM type: NRG; PAM sequence: AGG
tgtaatcccaacactttggg

SEQ ID NO: 8784 - DNA, 20 bp, Artificial Sequence
  Description of Artificial Sequence: Synthetic oligonucleotide
  Target: ANGPTL4; (-) strand; PAM type: NRG; PAM sequence: GAG
ctgtaatcccaacactttgg

SEQ ID NO: 8785 - DNA, 20 bp, Artificial Sequence
  Description of Artificial Sequence: Synthetic oligonucleotide
  Target: ANGPTL4; (-) strand; PAM type: NRG; PAM sequence: GGG
gcctgtaatcccaacacttt

SEQ ID NO: 8786 - DNA, 20 bp, Artificial Sequence
  Description of Artificial Sequence: Synthetic oligonucleotide
  Target: ANGPTL4; (-) strand; PAM type: NRG; PAM sequence: TGG
cgcctgtaatcccaacactt

SEQ ID NO: 8787 - DNA, 20 bp, Artificial Sequence
  Description of Artificial Sequence: Synthetic oligonucleotide
  Target: ANGPTL4; (-) strand; PAM type: NRG; PAM sequence: TGG
atgtttgtggccgggtattg

SEQ ID NO: 8788 - DNA, 20 bp, Artificial Sequence
  Description of Artificial Sequence: Synthetic oligonucleotide
  Target: ANGPTL4; (-) strand; PAM type: NRG; PAM sequence: GGG
ttataaagatgtttgtggcc

SEQ ID NO: 8789 - DNA, 20 bp, Artificial Sequence
  Description of Artificial Sequence: Synthetic oligonucleotide
  Target: ANGPTL4; (-) strand; PAM type: NRG; PAM sequence: CGG
attataaagatgtttgtggc

SEQ ID NO: 8790 - DNA, 20 bp, Artificial Sequence
  Description of Artificial Sequence: Synthetic oligonucleotide
  Target: ANGPTL4; (-) strand; PAM type: NRG; PAM sequence: TGG
caccattataaagatgtttg

SEQ ID NO: 8791 - DNA, 20 bp, Artificial Sequence
  Description of Artificial Sequence: Synthetic oligonucleotide
  Target: ANGPTL4; (-) strand; PAM type: NRG; PAM sequence: AAG
tcctgtggagcaccattata

SEQ ID NO: 8792 - DNA, 20 bp, Artificial Sequence
  Description of Artificial Sequence: Synthetic oligonucleotide
  Target: ANGPTL4; (-) strand; PAM type: NRG; PAM sequence: GAG
aaaaaaaaaagaatcctgtg

SEQ ID NO: 8793 - DNA, 20 bp, Artificial Sequence
  Description of Artificial Sequence: Synthetic oligonucleotide
  Target: ANGPTL4; (-) strand; PAM type: NRG; PAM sequence: TGG
aaaaaaaaaaaagaatcctg

SEQ ID NO: 8794 - DNA, 20 bp, Artificial Sequence
  Description of Artificial Sequence: Synthetic oligonucleotide
  Target: ANGPTL4; (-) strand; PAM type: NRG; PAM sequence: AAG
ttcaaaaaaaaaaaaaaaaa

SEQ ID NO: 8795 - DNA, 20 bp, Artificial Sequence
  Description of Artificial Sequence: Synthetic oligonucleotide
  Target: ANGPTL4; (-) strand; PAM type: NRG; PAM sequence: GAG
tccagcttaggcaacagagt

SEQ ID NO: 8796 - DNA, 20 bp, Artificial Sequence
  Description of Artificial Sequence: Synthetic oligonucleotide
  Target: ANGPTL4; (-) strand; PAM type: NRG; PAM sequence: GAG
gcactccagcttaggcaaca

SEQ ID NO: 8797 - DNA, 20 bp, Artificial Sequence
  Description of Artificial Sequence: Synthetic oligonucleotide
  Target: ANGPTL4; (-) strand; PAM type: NRG; PAM sequence: CAG
ctgcactccagcttaggcaa

SEQ ID NO: 8798 - DNA, 20 bp, Artificial Sequence
  Description of Artificial Sequence: Synthetic oligonucleotide
  Target: ANGPTL4; (-) strand; PAM type: NRG; PAM sequence: AGG
gcaccactgcactccagctt

SEQ ID NO: 8799 - DNA, 20 bp, Artificial Sequence
  Description of Artificial Sequence: Synthetic oligonucleotide
  Target: ANGPTL4; (-) strand; PAM type: NRG; PAM sequence: TAG
cgcaccactgcactccagct

SEQ ID NO: 8800 - DNA, 20 bp, Artificial Sequence
  Description of Artificial Sequence: Synthetic oligonucleotide
  Target: ANGPTL4; (-) strand; PAM type: NRG; PAM sequence: CAG
gagatcgcaccactgcactc

SEQ ID NO: 8801 - DNA, 20 bp, Artificial Sequence
  Description of Artificial Sequence: Synthetic oligonucleotide
  Target: ANGPTL4; (-) strand; PAM type: NRG; PAM sequence: GAG
ggtggaggttgcagtgagcc

SEQ ID NO: 8802 - DNA, 20 bp, Artificial Sequence
  Description of Artificial Sequence: Synthetic oligonucleotide
  Target: ANGPTL4; (-) strand; PAM type: NRG; PAM sequence: GAG
cgggaggtggaggttgcagt

SEQ ID NO: 8803 - DNA, 20 bp, Artificial Sequence
  Description of Artificial Sequence: Synthetic oligonucleotide
  Target: ANGPTL4; (-) strand; PAM type: NRG; PAM sequence: CAG
aacccgggaggtggaggttg

SEQ ID NO: 8804 - DNA, 20 bp, Artificial Sequence
  Description of Artificial Sequence: Synthetic oligonucleotide
  Target: ANGPTL4; (-) strand; PAM type: NRG; PAM sequence: AGG
tgcttgaacccgggaggtgg

SEQ ID NO: 8805 - DNA, 20 bp, Artificial Sequence
  Description of Artificial Sequence: Synthetic oligonucleotide
  Target: ANGPTL4; (-) strand; PAM type: NRG; PAM sequence: GAG
ttgcttgaacccgggaggtg

SEQ ID NO: 8806 - DNA, 20 bp, Artificial Sequence
  Description of Artificial Sequence: Synthetic oligonucleotide
  Target: ANGPTL4; (-) strand; PAM type: NRG; PAM sequence: TGG
aattgcttgaacccgggagg

SEQ ID NO: 8807 - DNA, 20 bp, Artificial Sequence
  Description of Artificial Sequence: Synthetic oligonucleotide
  Target: ANGPTL4; (-) strand; PAM type: NRG; PAM sequence: AGG
gagaattgcttgaacccggg

SEQ ID NO: 8808 - DNA, 20 bp, Artificial Sequence
  Description of Artificial Sequence: Synthetic oligonucleotide
  Target: ANGPTL4; (-) strand; PAM type: NRG; PAM sequence: GAG
tgagaattgcttgaacccgg

SEQ ID NO: 8809 - DNA, 20 bp, Artificial Sequence
  Description of Artificial Sequence: Synthetic oligonucleotide
  Target: ANGPTL4; (-) strand; PAM type: NRG; PAM sequence: GGG
tttgagaattgcttgaaccc

SEQ ID NO: 8810 - DNA, 20 bp, Artificial Sequence
  Description of Artificial Sequence: Synthetic oligonucleotide
  Target: ANGPTL4; (-) strand; PAM type: NRG; PAM sequence: CGG
ttttgagaattgcttgaacc

SEQ ID NO: 8811 - DNA, 20 bp, Artificial Sequence
  Description of Artificial Sequence: Synthetic oligonucleotide
  Target: ANGPTL4; (-) strand; PAM type: NRG; PAM sequence: GAG
cctaattttttttttttttt

SEQ ID NO: 8812 - DNA, 20 bp, Artificial Sequence
  Description of Artificial Sequence: Synthetic oligonucleotide
  Target: ANGPTL4; (-) strand; PAM type: NRG; PAM sequence: GAG
agtgctgggattgcaagtgt

SEQ ID NO: 8813 - DNA, 20 bp, Artificial Sequence
  Description of Artificial Sequence: Synthetic oligonucleotide
  Target: ANGPTL4; (-) strand; PAM type: NRG; PAM sequence: AAG
tcccaaagtgctgggattgc

SEQ ID NO: 8814 - DNA, 20 bp, Artificial Sequence
  Description of Artificial Sequence: Synthetic oligonucleotide
  Target: ANGPTL4; (-) strand; PAM type: NRG; PAM sequence: GGG
cttcagcctcccaaagtgct

SEQ ID NO: 8815 - DNA, 20 bp, Artificial Sequence
  Description of Artificial Sequence: Synthetic oligonucleotide
  Target: ANGPTL4; (-) strand; PAM type: NRG; PAM sequence: TGG
gcttcagcctcccaaagtgc

SEQ ID NO: 8816 - DNA, 20 bp, Artificial Sequence
  Description of Artificial Sequence: Synthetic oligonucleotide
  Target: ANGPTL4; (-) strand; PAM type: NRG; PAM sequence: AAG
ccactcgcttcagcctccca

SEQ ID NO: 8817 - DNA, 20 bp, Artificial Sequence
  Description of Artificial Sequence: Synthetic oligonucleotide
  Target: ANGPTL4; (-) strand; PAM type: NRG; PAM sequence: CAG
ctcaagtgatccactcgctt

SEQ ID NO: 8818 - DNA, 20 bp, Artificial Sequence
  Description of Artificial Sequence: Synthetic oligonucleotide
  Target: ANGPTL4; (-) strand; PAM type: NRG; PAM sequence: AAG
cagattggtctcctgggctc

SEQ ID NO: 8819 - DNA, 20 bp, Artificial Sequence
  Description of Artificial Sequence: Synthetic oligonucleotide
  Target: ANGPTL4; (-) strand; PAM type: NRG; PAM sequence: GGG
gttgctcagattggtctcct

SEQ ID NO: 8820 - DNA, 20 bp, Artificial Sequence
  Description of Artificial Sequence: Synthetic oligonucleotide
  Target: ANGPTL4; (-) strand; PAM type: NRG; PAM sequence: TGG
tgttgctcagattggtctcc

SEQ ID NO: 8821 - DNA, 20 bp, Artificial Sequence
  Description of Artificial Sequence: Synthetic oligonucleotide
  Target: ANGPTL4; (-) strand; PAM type: NRG; PAM sequence: TGG
tttcgccctgttgctcagat

SEQ ID NO: 8822 - DNA, 20 bp, Artificial Sequence
  Description of Artificial Sequence: Synthetic oligonucleotide
  Target: ANGPTL4; (-) strand; PAM type: NRG; PAM sequence: CAG
caggatttcgccctgttgct

SEQ ID NO: 8823 - DNA, 20 bp, Artificial Sequence
  Description of Artificial Sequence: Synthetic oligonucleotide
  Target: ANGPTL4; (-) strand; PAM type: NRG; PAM sequence: AGG
tttgtatttttaattgagac

SEQ ID NO: 8824 - DNA, 20 bp, Artificial Sequence
  Description of Artificial Sequence: Synthetic oligonucleotide
  Target: ANGPTL4; (-) strand; PAM type: NRG; PAM sequence: CAG
ttttgtatttttaattgaga

SEQ ID NO: 8825 - DNA, 20 bp, Artificial Sequence
  Description of Artificial Sequence: Synthetic oligonucleotide
  Target: ANGPTL4; (-) strand; PAM type: NRG; PAM sequence: GAG
agttttttgtatttttaatt

SEQ ID NO: 8826 - DNA, 20 bp, Artificial Sequence
  Description of Artificial Sequence: Synthetic oligonucleotide
  Target: ANGPTL4; (-) strand; PAM type: NRG; PAM sequence: TAG
caggcaccaccatgcccagc

SEQ ID NO: 8827 - DNA, 20 bp, Artificial Sequence
  Description of Artificial Sequence: Synthetic oligonucleotide
  Target: ANGPTL4; (-) strand; PAM type: NRG; PAM sequence: CAG
caggcaggcaccaccatgcc

SEQ ID NO: 8828 - DNA, 20 bp, Artificial Sequence
  Description of Artificial Sequence: Synthetic oligonucleotide
  Target: ANGPTL4; (-) strand; PAM type: NRG; PAM sequence: AGG
aagtagatgggaacacaggc

SEQ ID NO: 8829 - DNA, 20 bp, Artificial Sequence
  Description of Artificial Sequence: Synthetic oligonucleotide
  Target: ANGPTL4; (-) strand; PAM type: NRG; PAM sequence: CAG
caagtagatgggaacacagg

SEQ ID NO: 8830 - DNA, 20 bp, Artificial Sequence
  Description of Artificial Sequence: Synthetic oligonucleotide
  Target: ANGPTL4; (-) strand; PAM type: NRG; PAM sequence: AGG
tcccaagtagatgggaacac

SEQ ID NO: 8831 - DNA, 20 bp, Artificial Sequence
  Description of Artificial Sequence: Synthetic oligonucleotide
  Target: ANGPTL4; (-) strand; PAM type: NRG; PAM sequence: CAG
ctcccaagtagatgggaaca

SEQ ID NO: 8832 - DNA, 20 bp, Artificial Sequence
  Description of Artificial Sequence: Synthetic oligonucleotide
  Target: ANGPTL4; (-) strand; PAM type: NRG; PAM sequence: GGG
actcagcctcccaagtagat

SEQ ID NO: 8833 - DNA, 20 bp, Artificial Sequence
  Description of Artificial Sequence: Synthetic oligonucleotide
  Target: ANGPTL4; (-) strand; PAM type: NRG; PAM sequence: TGG
aactcagcctcccaagtaga

SEQ ID NO: 8834 - DNA, 20 bp, Artificial Sequence
  Description of Artificial Sequence: Synthetic oligonucleotide
  Target: ANGPTL4; (-) strand; PAM type: NRG; PAM sequence: TAG
tcccaactcagcctcccaag

SEQ ID NO: 8835 - DNA, 20 bp, Artificial Sequence
  Description of Artificial Sequence: Synthetic oligonucleotide
  Target: ANGPTL4; (-) strand; PAM type: NRG; PAM sequence: AAG
tcctcccaactcagcctccc

SEQ ID NO: 8836 - DNA, 20 bp, Artificial Sequence
  Description of Artificial Sequence: Synthetic oligonucleotide
  Target: ANGPTL4; (-) strand; PAM type: NRG; PAM sequence: CAG
ctcaagagatcctcccaact

SEQ ID NO: 8837 - DNA, 20 bp, Artificial Sequence
  Description of Artificial Sequence: Synthetic oligonucleotide
  Target: ANGPTL4; (-) strand; PAM type: NRG; PAM sequence: GAG
gccttatctcctaggctcaa

SEQ ID NO: 8838 - DNA, 20 bp, Artificial Sequence
  Description of Artificial Sequence: Synthetic oligonucleotide
  Target: ANGPTL4; (-) strand; PAM type: NRG; PAM sequence: AAG
cagccttatctcctaggctc

SEQ ID NO: 8839 - DNA, 20 bp, Artificial Sequence
  Description of Artificial Sequence: Synthetic oligonucleotide
  Target: ANGPTL4; (-) strand; PAM type: NRG; PAM sequence: AGG
tcactgcagccttatctcct

SEQ ID NO: 8840 - DNA, 20 bp, Artificial Sequence
  Description of Artificial Sequence: Synthetic oligonucleotide
  Target: ANGPTL4; (-) strand; PAM type: NRG; PAM sequence: TAG
ctcactgcagccttatctcc

SEQ ID NO: 8841 - DNA, 20 bp, Artificial Sequence
  Description of Artificial Sequence: Synthetic oligonucleotide
  Target: ANGPTL4; (-) strand; PAM type: NRG; PAM sequence: CAG
ggcgcagtctcagctcactg

SEQ ID NO: 8842 - DNA, 20 bp, Artificial Sequence
  Description of Artificial Sequence: Synthetic oligonucleotide
  Target: ANGPTL4; (-) strand; PAM type: NRG; PAM sequence: CAG
tgagtgcagtggcgcagtct

SEQ ID NO: 8843 - DNA, 20 bp, Artificial Sequence
  Description of Artificial Sequence: Synthetic oligonucleotide
  Target: ANGPTL4; (-) strand; PAM type: NRG; PAM sequence: CAG
caggcttgagtgcagtggcg

SEQ ID NO: 8844 - DNA, 20 bp, Artificial Sequence
  Description of Artificial Sequence: Synthetic oligonucleotide
  Target: ANGPTL4; (-) strand; PAM type: NRG; PAM sequence: TGG
tcacccaggcttgagtgcag

SEQ ID NO: 8845 - DNA, 20 bp, Artificial Sequence
  Description of Artificial Sequence: Synthetic oligonucleotide
  Target: ANGPTL4; (-) strand; PAM type: NRG; PAM sequence: CAG
ctgtcacccaggcttgagtg

SEQ ID NO: 8846 - DNA, 20 bp, Artificial Sequence
  Description of Artificial Sequence: Synthetic oligonucleotide
  Target: ANGPTL4; (-) strand; PAM type: NRG; PAM sequence: GAG
tcactctgtcacccaggctt

SEQ ID NO: 8847 - DNA, 20 bp, Artificial Sequence
  Description of Artificial Sequence: Synthetic oligonucleotide
  Target: ANGPTL4; (-) strand; PAM type: NRG; PAM sequence: AGG
ggggtctcactctgtcaccc

SEQ ID NO: 8848 - DNA, 20 bp, Artificial Sequence
  Description of Artificial Sequence: Synthetic oligonucleotide
  Target: ANGPTL4; (-) strand; PAM type: NRG; PAM sequence: CAG
aggggtctcactctgtcacc

SEQ ID NO: 8849 - DNA, 20 bp, Artificial Sequence
  Description of Artificial Sequence: Synthetic oligonucleotide
  Target: ANGPTL4; (-) strand; PAM type: NRG; PAM sequence: GGG
ttctttttcttttgaggcag

SEQ ID NO: 8850 - DNA, 20 bp, Artificial Sequence
  Description of Artificial Sequence: Synthetic oligonucleotide
  Target: ANGPTL4; (-) strand; PAM type: NRG; PAM sequence: GGG
tttctttttcttttgaggca

SEQ ID NO: 8851 - DNA, 20 bp, Artificial Sequence
  Description of Artificial Sequence: Synthetic oligonucleotide
  Target: ANGPTL4; (-) strand; PAM type: NRG; PAM sequence: AGG
ttttctttttcttttgaggc

SEQ ID NO: 8852 - DNA, 20 bp, Artificial Sequence
  Description of Artificial Sequence: Synthetic oligonucleotide
  Target: ANGPTL4; (-) strand; PAM type: NRG; PAM sequence: CAG
tttttctttttcttttgagg

SEQ ID NO: 8853 - DNA, 20 bp, Artificial Sequence
  Description of Artificial Sequence: Synthetic oligonucleotide
  Target: ANGPTL4; (-) strand; PAM type: NRG; PAM sequence: AGG
cattttttctttttcttttg

SEQ ID NO: 8854 - DNA, 20 bp, Artificial Sequence
  Description of Artificial Sequence: Synthetic oligonucleotide
  Target: ANGPTL4; (-) strand; PAM type: NRG; PAM sequence: GAG
gcattttttctttttctttt

SEQ ID NO: 8855 - DNA, 20 bp, Artificial Sequence
  Description of Artificial Sequence: Synthetic oligonucleotide
  Target: ANGPTL4; (-) strand; PAM type: NRG; PAM sequence: GAG
gtagctgggaccacaggtgt

SEQ ID NO: 8856 - DNA, 20 bp, Artificial Sequence
  Description of Artificial Sequence: Synthetic oligonucleotide
  Target: ANGPTL4; (-) strand; PAM type: NRG; PAM sequence: AGG
tcccaagtagctgggaccac

SEQ ID NO: 8857 - DNA, 20 bp, Artificial Sequence
  Description of Artificial Sequence: Synthetic oligonucleotide
  Target: ANGPTL4; (-) strand; PAM type: NRG; PAM sequence: CAG
ctcccaagtagctgggacca

SEQ ID NO: 8858 - DNA, 20 bp, Artificial Sequence
  Description of Artificial Sequence: Synthetic oligonucleotide
  Target: ANGPTL4; (-) strand; PAM type: NRG; PAM sequence: GGG
cctgggcctcccaagtagct

SEQ ID NO: 8859 - DNA, 20 bp, Artificial Sequence
  Description of Artificial Sequence: Synthetic oligonucleotide
  Target: ANGPTL4; (-) strand; PAM type: NRG; PAM sequence: TGG
acctgggcctcccaagtagc

SEQ ID NO: 8860 - DNA, 20 bp, Artificial Sequence
  Description of Artificial Sequence: Synthetic oligonucleotide
  Target: ANGPTL4; (-) strand; PAM type: NRG; PAM sequence: TAG
ttgtacctgggcctcccaag

SEQ ID NO: 8861 - DNA, 20 bp, Artificial Sequence
  Description of Artificial Sequence: Synthetic oligonucleotide
  Target: ANGPTL4; (-) strand; PAM type: NRG; PAM sequence: AAG
ttcttgtacctgggcctccc

SEQ ID NO: 8862 - DNA, 20 bp, Artificial Sequence
  Description of Artificial Sequence: Synthetic oligonucleotide
  Target: ANGPTL4; (-) strand; PAM type: NRG; PAM sequence: GGG
ctcaagtgattcttgtacct

SEQ ID NO: 8863 - DNA, 20 bp, Artificial Sequence
  Description of Artificial Sequence: Synthetic oligonucleotide
  Target: ANGPTL4; (-) strand; PAM type: NRG; PAM sequence: TGG
gctcaagtgattcttgtacc

SEQ ID NO: 8864 - DNA, 20 bp, Artificial Sequence
  Description of Artificial Sequence: Synthetic oligonucleotide
  Target: ANGPTL4; (-) strand; PAM type: NRG; PAM sequence: AAG
agcgtcaaccttacgggctc

SEQ ID NO: 8865 - DNA, 20 bp, Artificial Sequence
  Description of Artificial Sequence: Synthetic oligonucleotide
  Target: ANGPTL4; (-) strand; PAM type: NRG; PAM sequence: GGG
caatgcagcgtcaaccttac

SEQ ID NO: 8866 - DNA, 20 bp, Artificial Sequence
  Description of Artificial Sequence: Synthetic oligonucleotide
  Target: ANGPTL4; (-) strand; PAM type: NRG; PAM sequence: CGG
tcaatgcagcgtcaacctta

SEQ ID NO: 8867 - DNA, 20 bp, Artificial Sequence
  Description of Artificial Sequence: Synthetic oligonucleotide
  Target: ANGPTL4; (-) strand; PAM type: NRG; PAM sequence: CAG
ggtgtggtgatggctcaatg

SEQ ID NO: 8868 - DNA, 20 bp, Artificial Sequence
  Description of Artificial Sequence: Synthetic oligonucleotide
  Target: ANGPTL4; (-) strand; PAM type: NRG; PAM sequence: TGG
ggagtgcagtggtgtggtga

SEQ ID NO: 8869 - DNA, 20 bp, Artificial Sequence
  Description of Artificial Sequence: Synthetic oligonucleotide
  Target: ANGPTL4; (-) strand; PAM type: NRG; PAM sequence: TGG
caggctggagtgcagtggtg

SEQ ID NO: 8870 - DNA, 20 bp, Artificial Sequence
  Description of Artificial Sequence: Synthetic oligonucleotide
  Target: ANGPTL4; (-) strand; PAM type: NRG; PAM sequence: TGG
ttgcccaggctggagtgcag

SEQ ID NO: 8871 - DNA, 20 bp, Artificial Sequence
  Description of Artificial Sequence: Synthetic oligonucleotide
  Target: ANGPTL4; (-) strand; PAM type: NRG; PAM sequence: CAG
ccattgcccaggctggagtg

SEQ ID NO: 8872 - DNA, 20 bp, Artificial Sequence
  Description of Artificial Sequence: Synthetic oligonucleotide
  Target: ANGPTL4; (-) strand; PAM type: NRG; PAM sequence: GAG
tggctccattgcccaggctg

SEQ ID NO: 8873 - DNA, 20 bp, Artificial Sequence
  Description of Artificial Sequence: Synthetic oligonucleotide
  Target: ANGPTL4; (-) strand; PAM type: NRG; PAM sequence: TGG
cctggctccattgcccaggc

SEQ ID NO: 8874 - DNA, 20 bp, Artificial Sequence
  Description of Artificial Sequence: Synthetic oligonucleotide
  Target: ANGPTL4; (-) strand; PAM type: NRG; PAM sequence: AGG
agggcctggctccattgccc

SEQ ID NO: 8875 - DNA, 20 bp, Artificial Sequence
  Description of Artificial Sequence: Synthetic oligonucleotide
  Target: ANGPTL4; (-) strand; PAM type: NRG; PAM sequence: CAG
cagggcctggctccattgcc

SEQ ID NO: 8876 - DNA, 20 bp, Artificial Sequence
  Description of Artificial Sequence: Synthetic oligonucleotide
  Target: ANGPTL4; (-) strand; PAM type: NRG; PAM sequence: TGG
attttttttgagacagggcc

SEQ ID NO: 8877 - DNA, 20 bp, Artificial Sequence
  Description of Artificial Sequence: Synthetic oligonucleotide
  Target: ANGPTL4; (-) strand; PAM type: NRG; PAM sequence: GGG
aaacaattttttttgagaca

SEQ ID NO: 8878 - DNA, 20 bp, Artificial Sequence
  Description of Artificial Sequence: Synthetic oligonucleotide
  Target: ANGPTL4; (-) strand; PAM type: NRG; PAM sequence: AGG
aaaacaattttttttgagac

SEQ ID NO: 8879 - DNA, 20 bp, Artificial Sequence
  Description of Artificial Sequence: Synthetic oligonucleotide
  Target: ANGPTL4; (-) strand; PAM type: NRG; PAM sequence: CAG
aaaaacaattttttttgaga

SEQ ID NO: 8880 - DNA, 20 bp, Artificial Sequence
  Description of Artificial Sequence: Synthetic oligonucleotide
  Target: ANGPTL4; (-) strand; PAM type: NRG; PAM sequence: GAG
gtttaaaaacaatttttttt

SEQ ID NO: 8881 - DNA, 20 bp, Artificial Sequence
  Description of Artificial Sequence: Synthetic oligonucleotide
  Target: ANGPTL4; (-) strand; PAM type: NRG; PAM sequence: AAG
ccacacccggccttattttt

SEQ ID NO: 8882 - DNA, 20 bp, Artificial Sequence
  Description of Artificial Sequence: Synthetic oligonucleotide
  Target: ANGPTL4; (-) strand; PAM type: NRG; PAM sequence: CGG
caggtgtgagcccccacacc

SEQ ID NO: 8883 - DNA, 20 bp, Artificial Sequence
  Description of Artificial Sequence: Synthetic oligonucleotide
  Target: ANGPTL4; (-) strand; PAM type: NRG; PAM sequence: GAG
agtgctgggattacaggtgt

SEQ ID NO: 8884 - DNA, 20 bp, Artificial Sequence
  Description of Artificial Sequence: Synthetic oligonucleotide
  Target: ANGPTL4; (-) strand; PAM type: NRG; PAM sequence: AGG
tcccaaagtgctgggattac

SEQ ID NO: 8885 - DNA, 20 bp, Artificial Sequence
  Description of Artificial Sequence: Synthetic oligonucleotide
  Target: ANGPTL4; (-) strand; PAM type: NRG; PAM sequence: CAG
ctcccaaagtgctgggatta

SEQ ID NO: 8886 - DNA, 20 bp, Artificial Sequence
  Description of Artificial Sequence: Synthetic oligonucleotide
  Target: ANGPTL4; (-) strand; PAM type: NRG; PAM sequence: GGG
cctcggcctcccaaagtgct

SEQ ID NO: 8887 - DNA, 20 bp, Artificial Sequence
  Description of Artificial Sequence: Synthetic oligonucleotide
  Target: ANGPTL4; (-) strand; PAM type: NRG; PAM sequence: TGG
acctcggcctcccaaagtgc

SEQ ID NO: 8888 - DNA, 20 bp, Artificial Sequence
  Description of Artificial Sequence: Synthetic oligonucleotide
  Target: ANGPTL4; (-) strand; PAM type: NRG; PAM sequence: AAG
ccacccacctcggcctccca

SEQ ID NO: 8889 - DNA, 20 bp, Artificial Sequence
  Description of Artificial Sequence: Synthetic oligonucleotide
  Target: ANGPTL4; (-) strand; PAM type: NRG; PAM sequence: CGG
ctcaggtgatccacccacct

SEQ ID NO: 8890 - DNA, 20 bp, Artificial Sequence
  Description of Artificial Sequence: Synthetic oligonucleotide
  Target: ANGPTL4; (-) strand; PAM type: NRG; PAM sequence: AGG
agttttgaactcctgacctc

SEQ ID NO: 8891 - DNA, 20 bp, Artificial Sequence
  Description of Artificial Sequence: Synthetic oligonucleotide
  Target: ANGPTL4; (-) strand; PAM type: NRG; PAM sequence: CAG
tagttttgaactcctgacct

SEQ ID NO: 8892 - DNA, 20 bp, Artificial Sequence
  Description of Artificial Sequence: Synthetic oligonucleotide
  Target: ANGPTL4; (-) strand; PAM type: NRG; PAM sequence: TAG
tttcaccatgttggccaggc

SEQ ID NO: 8893 - DNA, 20 bp, Artificial Sequence
  Description of Artificial Sequence: Synthetic oligonucleotide
  Target: ANGPTL4; (-) strand; PAM type: NRG; PAM sequence: AGG
agggtttcaccatgttggcc

SEQ ID NO: 8894 - DNA, 20 bp, Artificial Sequence
  Description of Artificial Sequence: Synthetic oligonucleotide
  Target: ANGPTL4; (-) strand; PAM type: NRG; PAM sequence: CAG
cagggtttcaccatgttggc

SEQ ID NO: 8895 - DNA, 20 bp, Artificial Sequence
  Description of Artificial Sequence: Synthetic oligonucleotide
  Target: ANGPTL4; (-) strand; PAM type: NRG; PAM sequence: TGG
gagacagggtttcaccatgt

SEQ ID NO: 8896 - DNA, 20 bp, Artificial Sequence
  Description of Artificial Sequence: Synthetic oligonucleotide
  Target: ANGPTL4; (-) strand; PAM type: NRG; PAM sequence: GGG
ttgtatttttagtagagaca

SEQ ID NO: 8897 - DNA, 20 bp, Artificial Sequence
  Description of Artificial Sequence: Synthetic oligonucleotide
  Target: ANGPTL4; (-) strand; PAM type: NRG; PAM sequence: AGG
tttgtatttttagtagagac

SEQ ID NO: 8898 - DNA, 20 bp, Artificial Sequence
  Description of Artificial Sequence: Synthetic oligonucleotide
  Target: ANGPTL4; (-) strand; PAM type: NRG; PAM sequence: CAG
ttttgtatttttagtagaga

SEQ ID NO: 8899 - DNA, 20 bp, Artificial Sequence
  Description of Artificial Sequence: Synthetic oligonucleotide
  Target: ANGPTL4; (-) strand; PAM type: NRG; PAM sequence: GAG
taatttttgtatttttagta

SEQ ID NO: 8900 - DNA, 20 bp, Artificial Sequence
  Description of Artificial Sequence: Synthetic oligonucleotide
  Target: ANGPTL4; (-) strand; PAM type: NRG; PAM sequence: TAG
cctaatttttgtatttttag

SEQ ID NO: 8901 - DNA, 20 bp, Artificial Sequence
  Description of Artificial Sequence: Synthetic oligonucleotide
  Target: ANGPTL4; (-) strand; PAM type: NRG; PAM sequence: TAG
tggcctaatttttgtatttt

SEQ ID NO: 8902 - DNA, 20 bp, Artificial Sequence
  Description of Artificial Sequence: Synthetic oligonucleotide
  Target: ANGPTL4; (-) strand; PAM type: NRG; PAM sequence: TGG
caggtatgacccactgcgcc

SEQ ID NO: 8903 - DNA, 20 bp, Artificial Sequence
  Description of Artificial Sequence: Synthetic oligonucleotide
  Target: ANGPTL4; (-) strand; PAM type: NRG; PAM sequence: AGG
tcccaaagtgctgggattac

SEQ ID NO: 8904 - DNA, 20 bp, Artificial Sequence
  Description of Artificial Sequence: Synthetic oligonucleotide
  Target: ANGPTL4; (-) strand; PAM type: NRG; PAM sequence: CAG
ctcccaaagtgctgggatta

SEQ ID NO: 8905 - DNA, 20 bp, Artificial Sequence
  Description of Artificial Sequence: Synthetic oligonucleotide
  Target: ANGPTL4; (-) strand; PAM type: NRG; PAM sequence: GGG
cctcagcctcccaaagtgct

SEQ ID NO: 8906 - DNA, 20 bp, Artificial Sequence
  Description of Artificial Sequence: Synthetic oligonucleotide
  Target: ANGPTL4; (-) strand; PAM type: NRG; PAM sequence: TGG
tcctcagcctcccaaagtgc

SEQ ID NO: 8907 - DNA, 20 bp, Artificial Sequence
  Description of Artificial Sequence: Synthetic oligonucleotide
  Target: ANGPTL4; (-) strand; PAM type: NRG; PAM sequence: AAG
ccaccctcctcagcctccca

SEQ ID NO: 8908 - DNA, 20 bp, Artificial Sequence
  Description of Artificial Sequence: Synthetic oligonucleotide
  Target: ANGPTL4; (-) strand; PAM type: NRG; PAM sequence: CAG
ctcatgtgatccaccctcct

SEQ ID NO: 8909 - DNA, 20 bp, Artificial Sequence
  Description of Artificial Sequence: Synthetic oligonucleotide
  Target: ANGPTL4; (-) strand; PAM type: NRG; PAM sequence: TGG
tttcaccatgttggccaggt

SEQ ID NO: 8910 - DNA, 20 bp, Artificial Sequence
  Description of Artificial Sequence: Synthetic oligonucleotide
  Target: ANGPTL4; (-) strand; PAM type: NRG; PAM sequence: AGG
ggggtttcaccatgttggcc

SEQ ID NO: 8911 - DNA, 20 bp, Artificial Sequence
  Description of Artificial Sequence: Synthetic oligonucleotide
  Target: ANGPTL4; (-) strand; PAM type: NRG; PAM sequence: CAG
gggggtttcaccatgttggc

SEQ ID NO: 8912 - DNA, 20 bp, Artificial Sequence
  Description of Artificial Sequence: Synthetic oligonucleotide
  Target: ANGPTL4; (-) strand; PAM type: NRG; PAM sequence: TGG
gtgagggggtttcaccatgt

SEQ ID NO: 8913 - DNA, 20 bp, Artificial Sequence
  Description of Artificial Sequence: Synthetic oligonucleotide
  Target: ANGPTL4; (-) strand; PAM type: NRG; PAM sequence: GGG
ttgtatttttagtagtgagg

SEQ ID NO: 8914 - DNA, 20 bp, Artificial Sequence
  Description of Artificial Sequence: Synthetic oligonucleotide
  Target: ANGPTL4; (-) strand; PAM type: NRG; PAM sequence: GGG
tttgtatttttagtagtgag

SEQ ID NO: 8915 - DNA, 20 bp, Artificial Sequence
  Description of Artificial Sequence: Synthetic oligonucleotide
  Target: ANGPTL4; (-) strand; PAM type: NRG; PAM sequence: GGG
ttttgtatttttagtagtga

SEQ ID NO: 8916 - DNA, 20 bp, Artificial Sequence
  Description of Artificial Sequence: Synthetic oligonucleotide
  Target: ANGPTL4; (-) strand; PAM type: NRG; PAM sequence: AGG
tttttgtatttttagtagtg

SEQ ID NO: 8917 - DNA, 20 bp, Artificial Sequence
  Description of Artificial Sequence: Synthetic oligonucleotide
  Target: ANGPTL4; (-) strand; PAM type: NRG; PAM sequence: GAG
gtttttgtatttttagtagt

SEQ ID NO: 8918 - DNA, 20 bp, Artificial Sequence
  Description of Artificial Sequence: Synthetic oligonucleotide
  Target: ANGPTL4; (-) strand; PAM type: NRG; PAM sequence: TAG
gctagtttttgtatttttag

SEQ ID NO: 8919 - DNA, 20 bp, Artificial Sequence
  Description of Artificial Sequence: Synthetic oligonucleotide
  Target: ANGPTL4; (-) strand; PAM type: NRG; PAM sequence: TAG
ctggctagtttttgtatttt

SEQ ID NO: 8920 - DNA, 20 bp, Artificial Sequence
  Description of Artificial Sequence: Synthetic oligonucleotide
  Target: ANGPTL4; (-) strand; PAM type: NRG; PAM sequence: TAG
cacccgccaccacgcctggc

SEQ ID NO: 8921 - DNA, 20 bp, Artificial Sequence
  Description of Artificial Sequence: Synthetic oligonucleotide
  Target: ANGPTL4; (-) strand; PAM type: NRG; PAM sequence: TGG
caggcacccgccaccacgcc

SEQ ID NO: 8922 - DNA, 20 bp, Artificial Sequence
  Description of Artificial Sequence: Synthetic oligonucleotide
  Target: ANGPTL4; (-) strand; PAM type: NRG; PAM sequence: AGG
tcctgagtagccgggattac

SEQ ID NO: 8923 - DNA, 20 bp, Artificial Sequence
  Description of Artificial Sequence: Synthetic oligonucleotide
  Target: ANGPTL4; (-) strand; PAM type: NRG; PAM sequence: CAG
ctcctgagtagccgggatta

SEQ ID NO: 8924 - DNA, 20 bp, Artificial Sequence
  Description of Artificial Sequence: Synthetic oligonucleotide
  Target: ANGPTL4; (-) strand; PAM type: NRG; PAM sequence: GGG
cctcagcctcctgagtagcc

SEQ ID NO: 8925 - DNA, 20 bp, Artificial Sequence
  Description of Artificial Sequence: Synthetic oligonucleotide
  Target: ANGPTL4; (-) strand; PAM type: NRG; PAM sequence: CGG
gcctcagcctcctgagtagc

SEQ ID NO: 8926 - DNA, 20 bp, Artificial Sequence
  Description of Artificial Sequence: Synthetic oligonucleotide
  Target: ANGPTL4; (-) strand; PAM type: NRG; PAM sequence: TAG
tcatgcctcagcctcctgag

SEQ ID NO: 8927 - DNA, 20 bp, Artificial Sequence
  Description of Artificial Sequence: Synthetic oligonucleotide
  Target: ANGPTL4; (-) strand; PAM type: NRG; PAM sequence: GAG
ttctcatgcctcagcctcct

SEQ ID NO: 8928 - DNA, 20 bp, Artificial Sequence
  Description of Artificial Sequence: Synthetic oligonucleotide
  Target: ANGPTL4; (-) strand; PAM type: NRG; PAM sequence: CAG
ttcaagggattctcatgcct

SEQ ID NO: 8929 - DNA, 20 bp, Artificial Sequence
  Description of Artificial Sequence: Synthetic oligonucleotide
  Target: ANGPTL4; (-) strand; PAM type: NRG; PAM sequence: GGG
cctctgcctcccaggttcaa

SEQ ID NO: 8930 - DNA, 20 bp, Artificial Sequence
  Description of Artificial Sequence: Synthetic oligonucleotide
  Target: ANGPTL4; (-) strand; PAM type: NRG; PAM sequence: AGG
acctctgcctcccaggttca

SEQ ID NO: 8931 - DNA, 20 bp, Artificial Sequence
  Description of Artificial Sequence: Synthetic oligonucleotide
  Target: ANGPTL4; (-) strand; PAM type: NRG; PAM sequence: AAG
cacctctgcctcccaggttc

SEQ ID NO: 8932 - DNA, 20 bp, Artificial Sequence
  Description of Artificial Sequence: Synthetic oligonucleotide
  Target: ANGPTL4; (-) strand; PAM type: NRG; PAM sequence: AGG
tcactgcacctctgcctccc

SEQ ID NO: 8933 - DNA, 20 bp, Artificial Sequence
  Description of Artificial Sequence: Synthetic oligonucleotide
  Target: ANGPTL4; (-) strand; PAM type: NRG; PAM sequence: CAG
ctcactgcacctctgcctcc

SEQ ID NO: 8934 - DNA, 20 bp, Artificial Sequence
  Description of Artificial Sequence: Synthetic oligonucleotide
  Target: ANGPTL4; (-) strand; PAM type: NRG; PAM sequence: CGG
ggagtgcagtggcacaatct

SEQ ID NO: 8935 - DNA, 20 bp, Artificial Sequence
  Description of Artificial Sequence: Synthetic oligonucleotide
  Target: ANGPTL4; (-) strand; PAM type: NRG; PAM sequence: TGG
tctcccaggctggagtgcag

SEQ ID NO: 8936 - DNA, 20 bp, Artificial Sequence
  Description of Artificial Sequence: Synthetic oligonucleotide
  Target: ANGPTL4; (-) strand; PAM type: NRG; PAM sequence: CAG
ctatctcccaggctggagtg

SEQ ID NO: 8937 - DNA, 20 bp, Artificial Sequence
  Description of Artificial Sequence: Synthetic oligonucleotide
  Target: ANGPTL4; (-) strand; PAM type: NRG; PAM sequence: GAG
tcactctatctcccaggctg

SEQ ID NO: 8938 - DNA, 20 bp, Artificial Sequence
  Description of Artificial Sequence: Synthetic oligonucleotide
  Target: ANGPTL4; (-) strand; PAM type: NRG; PAM sequence: TGG
tctcactctatctcccaggc

SEQ ID NO: 8939 - DNA, 20 bp, Artificial Sequence
  Description of Artificial Sequence: Synthetic oligonucleotide
  Target: ANGPTL4; (-) strand; PAM type: NRG; PAM sequence: AGG
tgagtctcactctatctccc

SEQ ID NO: 8940 - DNA, 20 bp, Artificial Sequence
  Description of Artificial Sequence: Synthetic oligonucleotide
  Target: ANGPTL4; (-) strand; PAM type: NRG; PAM sequence: CAG
ctgagtctcactctatctcc

SEQ ID NO: 8941 - DNA, 20 bp, Artificial Sequence
  Description of Artificial Sequence: Synthetic oligonucleotide
  Target: ANGPTL4; (-) strand; PAM type: NRG; PAM sequence: GAG
tggtctttttttttgagact

SEQ ID NO: 8942 - DNA, 20 bp, Artificial Sequence
  Description of Artificial Sequence: Synthetic oligonucleotide
  Target: ANGPTL4; (-) strand; PAM type: NRG; PAM sequence: GAG
aatttttggtcttttttttt

SEQ ID NO: 8943 - DNA, 20 bp, Artificial Sequence
  Description of Artificial Sequence: Synthetic oligonucleotide
  Target: ANGPTL4; (-) strand; PAM type: NRG; PAM sequence: TGG
caccacacctggctaatttt

SEQ ID NO: 8944 - DNA, 20 bp, Artificial Sequence
  Description of Artificial Sequence: Synthetic oligonucleotide
  Target: ANGPTL4; (-) strand; PAM type: NRG; PAM sequence: TGG
caggcgcctgccaccacacc

SEQ ID NO: 8945 - DNA, 20 bp, Artificial Sequence
  Description of Artificial Sequence: Synthetic oligonucleotide
  Target: ANGPTL4; (-) strand; PAM type: NRG; PAM sequence: AGG
tcccgagtagctgggattac

SEQ ID NO: 8946 - DNA, 20 bp, Artificial Sequence
  Description of Artificial Sequence: Synthetic oligonucleotide
  Target: ANGPTL4; (-) strand; PAM type: NRG; PAM sequence: CAG
ctcccgagtagctgggatta

SEQ ID NO: 8947 - DNA, 20 bp, Artificial Sequence
  Description of Artificial Sequence: Synthetic oligonucleotide
  Target: ANGPTL4; (-) strand; PAM type: NRG; PAM sequence: GGG
cctcagcctcccgagtagct

SEQ ID NO: 8948 - DNA, 20 bp, Artificial Sequence
  Description of Artificial Sequence: Synthetic oligonucleotide
  Target: ANGPTL4; (-) strand; PAM type: NRG; PAM sequence: TGG
ccctcagcctcccgagtagc

SEQ ID NO: 8949 - DNA, 20 bp, Artificial Sequence
  Description of Artificial Sequence: Synthetic oligonucleotide
  Target: ANGPTL4; (-) strand; PAM type: NRG; PAM sequence: TAG
tcctccctcagcctcccgag

SEQ ID NO: 8950 - DNA, 20 bp, Artificial Sequence
  Description of Artificial Sequence: Synthetic oligonucleotide
  Target: ANGPTL4; (-) strand; PAM type: NRG; PAM sequence: GAG
ttctcctccctcagcctccc

SEQ ID NO: 8951 - DNA, 20 bp, Artificial Sequence
  Description of Artificial Sequence: Synthetic oligonucleotide
  Target: ANGPTL4; (-) strand; PAM type: NRG; PAM sequence: CAG
tttaagtgattctcctccct

SEQ ID NO: 8952 - DNA, 20 bp, Artificial Sequence
  Description of Artificial Sequence: Synthetic oligonucleotide
  Target: ANGPTL4; (-) strand; PAM type: NRG; PAM sequence: AAG
aacctccgtctctcaggttt

SEQ ID NO: 8953 - DNA, 20 bp, Artificial Sequence
  Description of Artificial Sequence: Synthetic oligonucleotide
  Target: ANGPTL4; (-) strand; PAM type: NRG; PAM sequence: AGG
cactgcaacctccgtctctc

SEQ ID NO: 8954 - DNA, 20 bp, Artificial Sequence
  Description of Artificial Sequence: Synthetic oligonucleotide
  Target: ANGPTL4; (-) strand; PAM type: NRG; PAM sequence: CAG
tcactgcaacctccgtctct

SEQ ID NO: 8955 - DNA, 20 bp, Artificial Sequence
  Description of Artificial Sequence: Synthetic oligonucleotide
  Target: ANGPTL4; (-) strand; PAM type: NRG; PAM sequence: CAG
ggagtgcagtggtgcgatct

SEQ ID NO: 8956 - DNA, 20 bp, Artificial Sequence
  Description of Artificial Sequence: Synthetic oligonucleotide
  Target: ANGPTL4; (-) strand; PAM type: NRG; PAM sequence: TGG
tcacccaggctggagtgcag

SEQ ID NO: 8957 - DNA, 20 bp, Artificial Sequence
  Description of Artificial Sequence: Synthetic oligonucleotide
  Target: ANGPTL4; (-) strand; PAM type: NRG; PAM sequence: CAG
ctgtcacccaggctggagtg

SEQ ID NO: 8958 - DNA, 20 bp, Artificial Sequence
  Description of Artificial Sequence: Synthetic oligonucleotide
  Target: ANGPTL4; (-) strand; PAM type: NRG; PAM sequence: GAG
ttactctgtcacccaggctg

SEQ ID NO: 8959 - DNA, 20 bp, Artificial Sequence
  Description of Artificial Sequence: Synthetic oligonucleotide
  Target: ANGPTL4; (-) strand; PAM type: NRG; PAM sequence: TGG
tcttactctgtcacccaggc

SEQ ID NO: 8960 - DNA, 20 bp, Artificial Sequence
  Description of Artificial Sequence: Synthetic oligonucleotide
  Target: ANGPTL4; (-) strand; PAM type: NRG; PAM sequence: AGG
tgagtcttactctgtcaccc

SEQ ID NO: 8961 - DNA, 20 bp, Artificial Sequence
  Description of Artificial Sequence: Synthetic oligonucleotide
  Target: ANGPTL4; (-) strand; PAM type: NRG; PAM sequence: CAG
ttgagtcttactctgtcacc

SEQ ID NO: 8962 - DNA, 20 bp, Artificial Sequence
  Description of Artificial Sequence: Synthetic oligonucleotide
  Target: ANGPTL4; (-) strand; PAM type: NRG; PAM sequence: GAG
acttttttttttttgagatt

SEQ ID NO: 8963 - DNA, 20 bp, Artificial Sequence
  Description of Artificial Sequence: Synthetic oligonucleotide
  Target: ANGPTL4; (-) strand; PAM type: NRG; PAM sequence: GAG
gacttgactttttttttttt

SEQ ID NO: 8964 - DNA, 20 bp, Artificial Sequence
  Description of Artificial Sequence: Synthetic oligonucleotide
  Target: ANGPTL4; (-) strand; PAM type: NRG; PAM sequence: TGG
ttggggaccaggctgggctt

SEQ ID NO: 8965 - DNA, 20 bp, Artificial Sequence
  Description of Artificial Sequence: Synthetic oligonucleotide
  Target: ANGPTL4; (-) strand; PAM type: NRG; PAM sequence: GGG
ggcaggttggggaccaggct

SEQ ID NO: 8966 - DNA, 20 bp, Artificial Sequence
  Description of Artificial Sequence: Synthetic oligonucleotide
  Target: ANGPTL4; (-) strand; PAM type: NRG; PAM sequence: TGG
aggcaggttggggaccaggc

SEQ ID NO: 8967 - DNA, 20 bp, Artificial Sequence
  Description of Artificial Sequence: Synthetic oligonucleotide
  Target: ANGPTL4; (-) strand; PAM type: NRG; PAM sequence: AGG
gatgaggcaggttggggacc

SEQ ID NO: 8968 - DNA, 20 bp, Artificial Sequence
  Description of Artificial Sequence: Synthetic oligonucleotide
  Target: ANGPTL4; (-) strand; PAM type: NRG; PAM sequence: CAG
ggatgaggcaggttggggac

SEQ ID NO: 8969 - DNA, 20 bp, Artificial Sequence
  Description of Artificial Sequence: Synthetic oligonucleotide
  Target: ANGPTL4; (-) strand; PAM type: NRG; PAM sequence: GGG
gttgaggatgaggcaggttg

SEQ ID NO: 8970 - DNA, 20 bp, Artificial Sequence
  Description of Artificial Sequence: Synthetic oligonucleotide
  Target: ANGPTL4; (-) strand; PAM type: NRG; PAM sequence: GGG
ggttgaggatgaggcaggtt

SEQ ID NO: 8971 - DNA, 20 bp, Artificial Sequence
  Description of Artificial Sequence: Synthetic oligonucleotide
  Target: ANGPTL4; (-) strand; PAM type: NRG; PAM sequence: TGG
gggttgaggatgaggcaggt

SEQ ID NO: 8972 - DNA, 20 bp, Artificial Sequence
  Description of Artificial Sequence: Synthetic oligonucleotide
  Target: ANGPTL4; (-) strand; PAM type: NRG; PAM sequence: AGG
gatagggttgaggatgaggc

SEQ ID NO: 8973 - DNA, 20 bp, Artificial Sequence
  Description of Artificial Sequence: Synthetic oligonucleotide
  Target: ANGPTL4; (-) strand; PAM type: NRG; PAM sequence: CAG
ggatagggttgaggatgagg

SEQ ID NO: 8974 - DNA, 20 bp, Artificial Sequence
  Description of Artificial Sequence: Synthetic oligonucleotide
  Target: ANGPTL4; (-) strand; PAM type: NRG; PAM sequence: AGG
tagggatagggttgaggatg

SEQ ID NO: 8975 - DNA, 20 bp, Artificial Sequence
  Description of Artificial Sequence: Synthetic oligonucleotide
  Target: ANGPTL4; (-) strand; PAM type: NRG; PAM sequence: GAG
atagggatagggttgaggat

SEQ ID NO: 8976 - DNA, 20 bp, Artificial Sequence
  Description of Artificial Sequence: Synthetic oligonucleotide
  Target: ANGPTL4; (-) strand; PAM type: NRG; PAM sequence: AGG
aggagatagggatagggttg

SEQ ID NO: 8977 - DNA, 20 bp, Artificial Sequence
  Description of Artificial Sequence: Synthetic oligonucleotide
  Target: ANGPTL4; (-) strand; PAM type: NRG; PAM sequence: GAG
aaggagatagggatagggtt

SEQ ID NO: 8978 - DNA, 20 bp, Artificial Sequence
  Description of Artificial Sequence: Synthetic oligonucleotide
  Target: ANGPTL4; (-) strand; PAM type: NRG; PAM sequence: GGG
gctgaaaggagatagggata

SEQ ID NO: 8979 - DNA, 20 bp, Artificial Sequence
  Description of Artificial Sequence: Synthetic oligonucleotide
  Target: ANGPTL4; (-) strand; PAM type: NRG; PAM sequence: AGG
ggctgaaaggagatagggat

SEQ ID NO: 8980 - DNA, 20 bp, Artificial Sequence
  Description of Artificial Sequence: Synthetic oligonucleotide
  Target: ANGPTL4; (-) strand; PAM type: NRG; PAM sequence: TAG
gggctgaaaggagataggga

SEQ ID NO: 8981 - DNA, 20 bp, Artificial Sequence
  Description of Artificial Sequence: Synthetic oligonucleotide
  Target: ANGPTL4; (-) strand; PAM type: NRG; PAM sequence: GGG
gatggggctgaaaggagata

SEQ ID NO: 8982 - DNA, 20 bp, Artificial Sequence
  Description of Artificial Sequence: Synthetic oligonucleotide
  Target: ANGPTL4; (-) strand; PAM type: NRG; PAM sequence: AGG
cgatggggctgaaaggagat

SEQ ID NO: 8983 - DNA, 20 bp, Artificial Sequence
  Description of Artificial Sequence: Synthetic oligonucleotide
  Target: ANGPTL4; (-) strand; PAM type: NRG; PAM sequence: TAG
ccgatggggctgaaaggaga

SEQ ID NO: 8984 - DNA, 20 bp, Artificial Sequence
  Description of Artificial Sequence: Synthetic oligonucleotide
  Target: ANGPTL4; (-) strand; PAM type: NRG; PAM sequence: GAG
gccaccgatggggctgaaag

SEQ ID NO: 8985 - DNA, 20 bp, Artificial Sequence
  Description of Artificial Sequence: Synthetic oligonucleotide
  Target: ANGPTL4; (-) strand; PAM type: NRG; PAM sequence: AGG
gagccaccgatggggctgaa

SEQ ID NO: 8986 - DNA, 20 bp, Artificial Sequence
  Description of Artificial Sequence: Synthetic oligonucleotide
  Target: ANGPTL4; (-) strand; PAM type: NRG; PAM sequence: AAG
tgagccaccgatggggctga

SEQ ID NO: 8987 - DNA, 20 bp, Artificial Sequence
  Description of Artificial Sequence: Synthetic oligonucleotide
  Target: ANGPTL4; (-) strand; PAM type: NRG; PAM sequence: GGG
aggtctttgagccaccgatg

SEQ ID NO: 8988 - DNA, 20 bp, Artificial Sequence
  Description of Artificial Sequence: Synthetic oligonucleotide
  Target: ANGPTL4; (-) strand; PAM type: NRG; PAM sequence: GGG
caggtctttgagccaccgat

SEQ ID NO: 8989 - DNA, 20 bp, Artificial Sequence
  Description of Artificial Sequence: Synthetic oligonucleotide
  Target: ANGPTL4; (-) strand; PAM type: NRG; PAM sequence: TGG
tcaggtctttgagccaccga

SEQ ID NO: 8990 - DNA, 20 bp, Artificial Sequence
  Description of Artificial Sequence: Synthetic oligonucleotide
  Target: ANGPTL4; (-) strand; PAM type: NRG; PAM sequence: GAG
gggaacatggtcaggtcttt

SEQ ID NO: 8991 - DNA, 20 bp, Artificial Sequence
  Description of Artificial Sequence: Synthetic oligonucleotide
  Target: ANGPTL4; (-) strand; PAM type: NRG; PAM sequence: AGG
aggggagagggaacatggtc

SEQ ID NO: 8992 - DNA, 20 bp, Artificial Sequence
  Description of Artificial Sequence: Synthetic oligonucleotide
  Target: ANGPTL4; (-) strand; PAM type: NRG; PAM sequence: CAG
caggggagagggaacatggt

SEQ ID NO: 8993 - DNA, 20 bp, Artificial Sequence
  Description of Artificial Sequence: Synthetic oligonucleotide
  Target: ANGPTL4; (-) strand; PAM type: NRG; PAM sequence: TGG
gggtcaggggagagggaaca

SEQ ID NO: 8994 - DNA, 20 bp, Artificial Sequence
  Description of Artificial Sequence: Synthetic oligonucleotide
  Target: ANGPTL4; (-) strand; PAM type: NRG; PAM sequence: GGG
cctgccggggtcaggggaga

SEQ ID NO: 8995 - DNA, 20 bp, Artificial Sequence
  Description of Artificial Sequence: Synthetic oligonucleotide
  Target: ANGPTL4; (-) strand; PAM type: NRG; PAM sequence: AGG
tcctgccggggtcaggggag

SEQ ID NO: 8996 - DNA, 20 bp, Artificial Sequence
  Description of Artificial Sequence: Synthetic oligonucleotide
  Target: ANGPTL4; (-) strand; PAM type: NRG; PAM sequence: GAG
ctcctgccggggtcagggga

SEQ ID NO: 8997 - DNA, 20 bp, Artificial Sequence
  Description of Artificial Sequence: Synthetic oligonucleotide
  Target: ANGPTL4; (-) strand; PAM type: NRG; PAM sequence: GAG
gcctcctgccggggtcaggg

SEQ ID NO: 8998 - DNA, 20 bp, Artificial Sequence
  Description of Artificial Sequence: Synthetic oligonucleotide
  Target: ANGPTL4; (-) strand; PAM type: NRG; PAM sequence: GGG
cagcctcctgccggggtcag

SEQ ID NO: 8999 - DNA, 20 bp, Artificial Sequence
  Description of Artificial Sequence: Synthetic oligonucleotide
  Target: ANGPTL4; (-) strand; PAM type: NRG; PAM sequence: GGG
ccagcctcctgccggggtca

SEQ ID NO: 9000 - DNA, 20 bp, Artificial Sequence
  Description of Artificial Sequence: Synthetic oligonucleotide
  Target: ANGPTL4; (-) strand; PAM type: NRG; PAM sequence: AGG
accagcctcctgccggggtc

SEQ ID NO: 9001 - DNA, 20 bp, Artificial Sequence
  Description of Artificial Sequence: Synthetic oligonucleotide
  Target: ANGPTL4; (-) strand; PAM type: NRG; PAM sequence: CAG
caccagcctcctgccggggt

SEQ ID NO: 9002 - DNA, 20 bp, Artificial Sequence
  Description of Artificial Sequence: Synthetic oligonucleotide
  Target: ANGPTL4; (-) strand; PAM type: NRG; PAM sequence: GGG
aaaccaccagcctcctgccg

SEQ ID NO: 9003 - DNA, 20 bp, Artificial Sequence
  Description of Artificial Sequence: Synthetic oligonucleotide
  Target: ANGPTL4; (-) strand; PAM type: NRG; PAM sequence: GGG
caaaccaccagcctcctgcc

SEQ ID NO: 9004 - DNA, 20 bp, Artificial Sequence
  Description of Artificial Sequence: Synthetic oligonucleotide
  Target: ANGPTL4; (-) strand; PAM type: NRG; PAM sequence: CGG
ccaaaccaccagcctcctgc

SEQ ID NO: 9005 - DNA, 20 bp, Artificial Sequence
  Description of Artificial Sequence: Synthetic oligonucleotide
  Target: ANGPTL4; (-) strand; PAM type: NRG; PAM sequence: CAG
ggctgcaggtgccaaaccac

SEQ ID NO: 9006 - DNA, 20 bp, Artificial Sequence
  Description of Artificial Sequence: Synthetic oligonucleotide
  Target: ANGPTL4; (-) strand; PAM type: NRG; PAM sequence: AGG
gttgaggttggaatggctgc

SEQ ID NO: 9007 - DNA, 20 bp, Artificial Sequence
  Description of Artificial Sequence: Synthetic oligonucleotide
  Target: ANGPTL4; (-) strand; PAM type: NRG; PAM sequence: CAG
cgttgaggttggaatggctg

SEQ ID NO: 9008 - DNA, 20 bp, Artificial Sequence
  Description of Artificial Sequence: Synthetic oligonucleotide
  Target: ANGPTL4; (-) strand; PAM type: NRG; PAM sequence: TGG
actggccgttgaggttggaa

SEQ ID NO: 9009 - DNA, 20 bp, Artificial Sequence
  Description of Artificial Sequence: Synthetic oligonucleotide
  Target: ANGPTL4; (-) strand; PAM type: NRG; PAM sequence: TGG
gaagtactggccgttgaggt

SEQ ID NO: 9010 - DNA, 20 bp, Artificial Sequence
  Description of Artificial Sequence: Synthetic oligonucleotide
  Target: ANGPTL4; (-) strand; PAM type: NRG; PAM sequence: AGG
agcggaagtactggccgttg

SEQ ID NO: 9011 - DNA, 20 bp, Artificial Sequence
  Description of Artificial Sequence: Synthetic oligonucleotide
  Target: ANGPTL4; (-) strand; PAM type: NRG; PAM sequence: GAG
gagcggaagtactggccgtt

SEQ ID NO: 9012 - DNA, 20 bp, Artificial Sequence
  Description of Artificial Sequence: Synthetic oligonucleotide
  Target: ANGPTL4; (-) strand; PAM type: NRG; PAM sequence: TGG
gtgggatggagcggaagtac

SEQ ID NO: 9013 - DNA, 20 bp, Artificial Sequence
  Description of Artificial Sequence: Synthetic oligonucleotide
  Target: ANGPTL4; (-) strand; PAM type: NRG; PAM sequence: AAG
gctgctgtgggatggagcgg

SEQ ID NO: 9014 - DNA, 20 bp, Artificial Sequence
  Description of Artificial Sequence: Synthetic oligonucleotide
  Target: ANGPTL4; (-) strand; PAM type: NRG; PAM sequence: CGG
gccgctgctgtgggatggag

SEQ ID NO: 9015 - DNA, 20 bp, Artificial Sequence
  Description of Artificial Sequence: Synthetic oligonucleotide
  Target: ANGPTL4; (-) strand; PAM type: NRG; PAM sequence: GAG
tctgccgctgctgtgggatg

SEQ ID NO: 9016 - DNA, 20 bp, Artificial Sequence
  Description of Artificial Sequence: Synthetic oligonucleotide
  Target: ANGPTL4; (-) strand; PAM type: NRG; PAM sequence: TGG
cttctgccgctgctgtggga

SEQ ID NO: 9017 - DNA, 20 bp, Artificial Sequence
  Description of Artificial Sequence: Synthetic oligonucleotide
  Target: ANGPTL4; (-) strand; PAM type: NRG; PAM sequence: GGG
taagcttctgccgctgctgt

SEQ ID NO: 9018 - DNA, 20 bp, Artificial Sequence
  Description of Artificial Sequence: Synthetic oligonucleotide
  Target: ANGPTL4; (-) strand; PAM type: NRG; PAM sequence: TGG
ttaagcttctgccgctgctg

SEQ ID NO: 9019 - DNA, 20 bp, Artificial Sequence
  Description of Artificial Sequence: Synthetic oligonucleotide
  Target: ANGPTL4; (-) strand; PAM type: NRG; PAM sequence: AAG
ttccagaagattcccttctt

SEQ ID NO: 9020 - DNA, 20 bp, Artificial Sequence
  Description of Artificial Sequence: Synthetic oligonucleotide
  Target: ANGPTL4; (-) strand; PAM type: NRG; PAM sequence: AAG
ggccccgccaggtcttccag

SEQ ID NO: 9021 - DNA, 20 bp, Artificial Sequence
  Description of Artificial Sequence: Synthetic oligonucleotide
  Target: ANGPTL4; (-) strand; PAM type: NRG; PAM sequence: CAG
agcggccccgccaggtcttc

SEQ ID NO: 9022 - DNA, 20 bp, Artificial Sequence
  Description of Artificial Sequence: Synthetic oligonucleotide
  Target: ANGPTL4; (-) strand; PAM type: NRG; PAM sequence: AGG
cgggtagtagcggccccgcc

SEQ ID NO: 9023 - DNA, 20 bp, Artificial Sequence
  Description of Artificial Sequence: Synthetic oligonucleotide
  Target: ANGPTL4; (-) strand; PAM type: NRG; PAM sequence: CAG
gcgggtagtagcggccccgc

SEQ ID NO: 9024 - DNA, 20 bp, Artificial Sequence
  Description of Artificial Sequence: Synthetic oligonucleotide
  Target: ANGPTL4; (-) strand; PAM type: NRG; PAM sequence: CGG
tggcctgcagcgggtagtag

SEQ ID NO: 9025 - DNA, 20 bp, Artificial Sequence
  Description of Artificial Sequence: Synthetic oligonucleotide
  Target: ANGPTL4; (-) strand; PAM type: NRG; PAM sequence: TAG
tggtggcctgcagcgggtag

SEQ ID NO: 9026 - DNA, 20 bp, Artificial Sequence
  Description of Artificial Sequence: Synthetic oligonucleotide
  Target: ANGPTL4; (-) strand; PAM type: NRG; PAM sequence: TAG
tggtggtggcctgcagcggg

SEQ ID NO: 9027 - DNA, 20 bp, Artificial Sequence
  Description of Artificial Sequence: Synthetic oligonucleotide
  Target: ANGPTL4; (-) strand; PAM type: NRG; PAM sequence: GGG
acatggtggtggcctgcagc

SEQ ID NO: 9028 - DNA, 20 bp, Artificial Sequence
  Description of Artificial Sequence: Synthetic oligonucleotide
  Target: ANGPTL4; (-) strand; PAM type: NRG; PAM sequence: CGG
aacatggtggtggcctgcag

SEQ ID NO: 9029 - DNA, 20 bp, Artificial Sequence
  Description of Artificial Sequence: Synthetic oligonucleotide
  Target: ANGPTL4; (-) strand; PAM type: NRG; PAM sequence: CAG
atcaacatggtggtggcctg

SEQ ID NO: 9030 - DNA, 20 bp, Artificial Sequence
  Description of Artificial Sequence: Synthetic oligonucleotide
  Target: ANGPTL4; (-) strand; PAM type: NRG; PAM sequence: TGG
gggctggatcaacatggtgg

SEQ ID NO: 9031 - DNA, 20 bp, Artificial Sequence
  Description of Artificial Sequence: Synthetic oligonucleotide
  Target: ANGPTL4; (-) strand; PAM type: NRG; PAM sequence: TGG
catgggctggatcaacatgg

SEQ ID NO: 9032 - DNA, 20 bp, Artificial Sequence
  Description of Artificial Sequence: Synthetic oligonucleotide
  Target: ANGPTL4; (-) strand; PAM type: NRG; PAM sequence: TGG
tgccatgggctggatcaaca

SEQ ID NO: 9033 - DNA, 20 bp, Artificial Sequence
  Description of Artificial Sequence: Synthetic oligonucleotide
  Target: ANGPTL4; (-) strand; PAM type: NRG; PAM sequence: TGG
ctgcctctgctgccatgggc

SEQ ID NO: 9034 - DNA, 20 bp, Artificial Sequence
  Description of Artificial Sequence: Synthetic oligonucleotide
  Target: ANGPTL4; (-) strand; PAM type: NRG; PAM sequence: GGG
gaggctgcctctgctgccat

SEQ ID NO: 9035 - DNA, 20 bp, Artificial Sequence
  Description of Artificial Sequence: Synthetic oligonucleotide
  Target: ANGPTL4; (-) strand; PAM type: NRG; PAM sequence: TGG
ggaggctgcctctgctgcca

SEQ ID NO: 9036 - DNA, 20 bp, Artificial Sequence
  Description of Artificial Sequence: Synthetic oligonucleotide
  Target: ANGPTL4; (-) strand; PAM type: NRG; PAM sequence: AGG
ggcccagccaggacgctagg

SEQ ID NO: 9037 - DNA, 20 bp, Artificial Sequence
  Description of Artificial Sequence: Synthetic oligonucleotide
  Target: ANGPTL4; (-) strand; PAM type: NRG; PAM sequence: GAG
aggcccagccaggacgctag

SEQ ID NO: 9038 - DNA, 20 bp, Artificial Sequence
  Description of Artificial Sequence: Synthetic oligonucleotide
  Target: ANGPTL4; (-) strand; PAM type: NRG; PAM sequence: AGG
ccaggcccagccaggacgct

SEQ ID NO: 9039 - DNA, 20 bp, Artificial Sequence
  Description of Artificial Sequence: Synthetic oligonucleotide
  Target: ANGPTL4; (-) strand; PAM type: NRG; PAM sequence: TAG
accaggcccagccaggacgc

SEQ ID NO: 9040 - DNA, 20 bp, Artificial Sequence
  Description of Artificial Sequence: Synthetic oligonucleotide
  Target: ANGPTL4; (-) strand; PAM type: NRG; PAM sequence: AGG
gcctgggaccaggcccagcc

SEQ ID NO: 9041 - DNA, 20 bp, Artificial Sequence
  Description of Artificial Sequence: Synthetic oligonucleotide
  Target: ANGPTL4; (-) strand; PAM type: NRG; PAM sequence: CAG
ggcctgggaccaggcccagc

SEQ ID NO: 9042 - DNA, 20 bp, Artificial Sequence
  Description of Artificial Sequence: Synthetic oligonucleotide
  Target: ANGPTL4; (-) strand; PAM type: NRG; PAM sequence: CAG
cgtgggcctgggaccaggcc

SEQ ID NO: 9043 - DNA, 20 bp, Artificial Sequence
  Description of Artificial Sequence: Synthetic oligonucleotide
  Target: ANGPTL4; (-) strand; PAM type: NRG; PAM sequence: AGG
tctttcgtgggcctgggacc

SEQ ID NO: 9044 - DNA, 20 bp, Artificial Sequence
  Description of Artificial Sequence: Synthetic oligonucleotide
  Target: ANGPTL4; (-) strand; PAM type: NRG; PAM sequence: CAG
gtctttcgtgggcctgggac

SEQ ID NO: 9045 - DNA, 20 bp, Artificial Sequence
  Description of Artificial Sequence: Synthetic oligonucleotide
  Target: ANGPTL4; (-) strand; PAM type: NRG; PAM sequence: GGG
tcaccgtctttcgtgggcct

SEQ ID NO: 9046 - DNA, 20 bp, Artificial Sequence
  Description of Artificial Sequence: Synthetic oligonucleotide
  Target: ANGPTL4; (-) strand; PAM type: NRG; PAM sequence: TGG
gtcaccgtctttcgtgggcc

SEQ ID NO: 9047 - DNA, 20 bp, Artificial Sequence
  Description of Artificial Sequence: Synthetic oligonucleotide
  Target: ANGPTL4; (-) strand; PAM type: NRG; PAM sequence: GGG
caagagtcaccgtctttcgt

SEQ ID NO: 9048 - DNA, 20 bp, Artificial Sequence
  Description of Artificial Sequence: Synthetic oligonucleotide
  Target: ANGPTL4; (-) strand; PAM type: NRG; PAM sequence: TGG
ccaagagtcaccgtctttcg

SEQ ID NO: 9049 - DNA, 20 bp, Artificial Sequence
  Description of Artificial Sequence: Synthetic oligonucleotide
  Target: ANGPTL4; (-) strand; PAM type: NRG; PAM sequence: GAG
acatcctcgggcagagccaa

SEQ ID NO: 9050 - DNA, 20 bp, Artificial Sequence
  Description of Artificial Sequence: Synthetic oligonucleotide
  Target: ANGPTL4; (-) strand; PAM type: NRG; PAM sequence: AAG
ccacatcctcgggcagagcc

SEQ ID NO: 9051 - DNA, 20 bp, Artificial Sequence
  Description of Artificial Sequence: Synthetic oligonucleotide
  Target: ANGPTL4; (-) strand; PAM type: NRG; PAM sequence: GAG
aacggccacatcctcgggca

SEQ ID NO: 9052 - DNA, 20 bp, Artificial Sequence
  Description of Artificial Sequence: Synthetic oligonucleotide
  Target: ANGPTL4; (-) strand; PAM type: NRG; PAM sequence: CAG
ggaacggccacatcctcggg

SEQ ID NO: 9053 - DNA, 20 bp, Artificial Sequence
  Description of Artificial Sequence: Synthetic oligonucleotide
  Target: ANGPTL4; (-) strand; PAM type: NRG; PAM sequence: GGG
cagggaacggccacatcctc

SEQ ID NO: 9054 - DNA, 20 bp, Artificial Sequence
  Description of Artificial Sequence: Synthetic oligonucleotide
  Target: ANGPTL4; (-) strand; PAM type: NRG; PAM sequence: CGG
gcagggaacggccacatcct

SEQ ID NO: 9055 - DNA, 20 bp, Artificial Sequence
  Description of Artificial Sequence: Synthetic oligonucleotide
  Target: ANGPTL4; (-) strand; PAM type: NRG; PAM sequence: CGG
gcccctgcccaggcagggaa

SEQ ID NO: 9056 - DNA, 20 bp, Artificial Sequence
  Description of Artificial Sequence: Synthetic oligonucleotide
  Target: ANGPTL4; (-) strand; PAM type: NRG; PAM sequence: GGG
ttggagcccctgcccaggca

SEQ ID NO: 9057 - DNA, 20 bp, Artificial Sequence
  Description of Artificial Sequence: Synthetic oligonucleotide
  Target: ANGPTL4; (-) strand; PAM type: NRG; PAM sequence: AGG
cttggagcccctgcccaggc

SEQ ID NO: 9058 - DNA, 20 bp, Artificial Sequence
  Description of Artificial Sequence: Synthetic oligonucleotide
  Target: ANGPTL4; (-) strand; PAM type: NRG; PAM sequence: CAG
ccttggagcccctgcccagg

SEQ ID NO: 9059 - DNA, 20 bp, Artificial Sequence
  Description of Artificial Sequence: Synthetic oligonucleotide
  Target: ANGPTL4; (-) strand; PAM type: NRG; PAM sequence: AGG
cctccttggagcccctgccc

SEQ ID NO: 9060 - DNA, 20 bp, Artificial Sequence
  Description of Artificial Sequence: Synthetic oligonucleotide
  Target: ANGPTL4; (-) strand; PAM type: NRG; PAM sequence: CAG
ccctccttggagcccctgcc

SEQ ID NO: 9061 - DNA, 20 bp, Artificial Sequence
  Description of Artificial Sequence: Synthetic oligonucleotide
  Target: ANGPTL4; (-) strand; PAM type: NRG; PAM sequence: GAG
ttccagatggcccctccttg

SEQ ID NO: 9062 - DNA, 20 bp, Artificial Sequence
  Description of Artificial Sequence: Synthetic oligonucleotide
  Target: ANGPTL4; (-) strand; PAM type: NRG; PAM sequence: TGG
gtttccagatggcccctcct

SEQ ID NO: 9063 - DNA, 20 bp, Artificial Sequence
  Description of Artificial Sequence: Synthetic oligonucleotide
  Target: ANGPTL4; (-) strand; PAM type: NRG; PAM sequence: TGG
tctgtccacaagtttccaga

SEQ ID NO: 9064 - DNA, 20 bp, Artificial Sequence
  Description of Artificial Sequence: Synthetic oligonucleotide
  Target: ANGPTL4; (-) strand; PAM type: NRG; PAM sequence: CAG
cttctctgtccacaagtttc

SEQ ID NO: 9065 - DNA, 20 bp, Artificial Sequence
  Description of Artificial Sequence: Synthetic oligonucleotide
  Target: ANGPTL4; (-) strand; PAM type: NRG; PAM sequence: AAG
tggtcttcttctctgtccac

SEQ ID NO: 9066 - DNA, 20 bp, Artificial Sequence
  Description of Artificial Sequence: Synthetic oligonucleotide
  Target: ANGPTL4; (-) strand; PAM type: NRG; PAM sequence: TGG
aaagggggcttctccagtcg

SEQ ID NO: 9067 - DNA, 20 bp, Artificial Sequence
  Description of Artificial Sequence: Synthetic oligonucleotide
  Target: ANGPTL4; (-) strand; PAM type: NRG; PAM sequence: CAG
actcagaaagggggcttctc

SEQ ID NO: 9068 - DNA, 20 bp, Artificial Sequence
  Description of Artificial Sequence: Synthetic oligonucleotide
  Target: ANGPTL4; (-) strand; PAM type: NRG; PAM sequence: GGG
cccccctgcactcagaaagg

SEQ ID NO: 9069 - DNA, 20 bp, Artificial Sequence
  Description of Artificial Sequence: Synthetic oligonucleotide
  Target: ANGPTL4; (-) strand; PAM type: NRG; PAM sequence: GGG
gcccccctgcactcagaaag

SEQ ID NO: 9070 - DNA, 20 bp, Artificial Sequence
  Description of Artificial Sequence: Synthetic oligonucleotide
  Target: ANGPTL4; (-) strand; PAM type: NRG; PAM sequence: GGG
agcccccctgcactcagaaa

SEQ ID NO: 9071 - DNA, 20 bp, Artificial Sequence
  Description of Artificial Sequence: Synthetic oligonucleotide
  Target: ANGPTL4; (-) strand; PAM type: NRG; PAM sequence: AGG
cagcccccctgcactcagaa

SEQ ID NO: 9072 - DNA, 20 bp, Artificial Sequence
  Description of Artificial Sequence: Synthetic oligonucleotide
  Target: ANGPTL4; (-) strand; PAM type: NRG; PAM sequence: AAG
gcagcccccctgcactcaga

SEQ ID NO: 9073 - DNA, 20 bp, Artificial Sequence
  Description of Artificial Sequence: Synthetic oligonucleotide
  Target: ANGPTL4; (-) strand; PAM type: NRG; PAM sequence: CAG
gcatgcagcccccctgcact

SEQ ID NO: 9074 - DNA, 20 bp, Artificial Sequence
  Description of Artificial Sequence: Synthetic oligonucleotide
  Target: ANGPTL4; (-) strand; PAM type: NRG; PAM sequence: CAG
atctcaggaggcaacgcatg

SEQ ID NO: 9075 - DNA, 20 bp, Artificial Sequence
  Description of Artificial Sequence: Synthetic oligonucleotide
  Target: ANGPTL4; (-) strand; PAM type: NRG; PAM sequence: AGG
cctgcagcctcgatctcagg

SEQ ID NO: 9076 - DNA, 20 bp, Artificial Sequence
  Description of Artificial Sequence: Synthetic oligonucleotide
  Target: ANGPTL4; (-) strand; PAM type: NRG; PAM sequence: GAG
tcctgcagcctcgatctcag

SEQ ID NO: 9077 - DNA, 20 bp, Artificial Sequence
  Description of Artificial Sequence: Synthetic oligonucleotide
  Target: ANGPTL4; (-) strand; PAM type: NRG; PAM sequence: AGG
tatcctgcagcctcgatctc

SEQ ID NO: 9078 - DNA, 20 bp, Artificial Sequence
  Description of Artificial Sequence: Synthetic oligonucleotide
  Target: ANGPTL4; (-) strand; PAM type: NRG; PAM sequence: CAG
atatcctgcagcctcgatct

SEQ ID NO: 9079 - DNA, 20 bp, Artificial Sequence
  Description of Artificial Sequence: Synthetic oligonucleotide
  Target: ANGPTL4; (-) strand; PAM type: NRG; PAM sequence: CAG
tagagtctgagcatatcctg

SEQ ID NO: 9080 - DNA, 20 bp, Artificial Sequence
  Description of Artificial Sequence: Synthetic oligonucleotide
  Target: ANGPTL4; (-) strand; PAM type: NRG; PAM sequence: GAG
ggtccacgcctctagagtct

SEQ ID NO: 9081 - DNA, 20 bp, Artificial Sequence
  Description of Artificial Sequence: Synthetic oligonucleotide
  Target: ANGPTL4; (-) strand; PAM type: NRG; PAM sequence: GAG
ccccttggtccacgcctcta

SEQ ID NO: 9082 - DNA, 20 bp, Artificial Sequence
  Description of Artificial Sequence: Synthetic oligonucleotide
  Target: ANGPTL4; (-) strand; PAM type: NRG; PAM sequence: TAG
tgccccttggtccacgcctc

SEQ ID NO: 9083 - DNA, 20 bp, Artificial Sequence
  Description of Artificial Sequence: Synthetic oligonucleotide
  Target: ANGPTL4; (-) strand; PAM type: NRG; PAM sequence: TGG
gagtgaagctccatgcccct

SEQ ID NO: 9084 - DNA, 20 bp, Artificial Sequence
  Description of Artificial Sequence: Synthetic oligonucleotide
  Target: ANGPTL4; (-) strand; PAM type: NRG; PAM sequence: AAG
tccctggccagcaaggagtg

SEQ ID NO: 9085 - DNA, 20 bp, Artificial Sequence
  Description of Artificial Sequence: Synthetic oligonucleotide
  Target: ANGPTL4; (-) strand; PAM type: NRG; PAM sequence: GAG
ccaactccctggccagcaag

SEQ ID NO: 9086 - DNA, 20 bp, Artificial Sequence
  Description of Artificial Sequence: Synthetic oligonucleotide
  Target: ANGPTL4; (-) strand; PAM type: NRG; PAM sequence: AGG
ccccaactccctggccagca

SEQ ID NO: 9087 - DNA, 20 bp, Artificial Sequence
  Description of Artificial Sequence: Synthetic oligonucleotide
  Target: ANGPTL4; (-) strand; PAM type: NRG; PAM sequence: AAG
tccccaactccctggccagc

SEQ ID NO: 9088 - DNA, 20 bp, Artificial Sequence
  Description of Artificial Sequence: Synthetic oligonucleotide
  Target: ANGPTL4; (-) strand; PAM type: NRG; PAM sequence: CAG
tgagtccccaactccctggc

SEQ ID NO: 9089 - DNA, 20 bp, Artificial Sequence
  Description of Artificial Sequence: Synthetic oligonucleotide
  Target: ANGPTL4; (-) strand; PAM type: NRG; PAM sequence: TGG
cctctgagtccccaactccc

SEQ ID NO: 9090 - DNA, 20 bp, Artificial Sequence
  Description of Artificial Sequence: Synthetic oligonucleotide
  Target: ANGPTL4; (-) strand; PAM type: NRG; PAM sequence: GAG
tggccccaagtggtccctct

SEQ ID NO: 9091 - DNA, 20 bp, Artificial Sequence
  Description of Artificial Sequence: Synthetic oligonucleotide
  Target: ANGPTL4; (-) strand; PAM type: NRG; PAM sequence: TGG
ccagtctggctggccccaag

SEQ ID NO: 9092 - DNA, 20 bp, Artificial Sequence
  Description of Artificial Sequence: Synthetic oligonucleotide
  Target: ANGPTL4; (-) strand; PAM type: NRG; PAM sequence: AAG
aggccagtctggctggcccc

SEQ ID NO: 9093 - DNA, 20 bp, Artificial Sequence
  Description of Artificial Sequence: Synthetic oligonucleotide
  Target: ANGPTL4; (-) strand; PAM type: NRG; PAM sequence: TGG
gccattgaggccagtctggc

SEQ ID NO: 9094 - DNA, 20 bp, Artificial Sequence
  Description of Artificial Sequence: Synthetic oligonucleotide
  Target: ANGPTL4; (-) strand; PAM type: NRG; PAM sequence: TGG
gtccgccattgaggccagtc

SEQ ID NO: 9095 - DNA, 20 bp, Artificial Sequence
  Description of Artificial Sequence: Synthetic oligonucleotide
  Target: ANGPTL4; (-) strand; PAM type: NRG; PAM sequence: CAG
actgagtccgccattgaggc

SEQ ID NO: 9096 - DNA, 20 bp, Artificial Sequence
  Description of Artificial Sequence: Synthetic oligonucleotide
  Target: ANGPTL4; (-) strand; PAM type: NRG; PAM sequence: AGG
tgtgactgagtccgccattg

SEQ ID NO: 9097 - DNA, 20 bp, Artificial Sequence
  Description of Artificial Sequence: Synthetic oligonucleotide
  Target: ANGPTL4; (-) strand; PAM type: NRG; PAM sequence: GAG
atgtgactgagtccgccatt

SEQ ID NO: 9098 - DNA, 20 bp, Artificial Sequence
  Description of Artificial Sequence: Synthetic oligonucleotide
  Target: ANGPTL4; (-) strand; PAM type: NRG; PAM sequence: GAG
ccccgtcagtcaatgtgact

SEQ ID NO: 9099 - DNA, 20 bp, Artificial Sequence
  Description of Artificial Sequence: Synthetic oligonucleotide
  Target: ANGPTL4; (-) strand; PAM type: NRG; PAM sequence: CAG
acacaagccctggtccccgt

SEQ ID NO: 9100 - DNA, 20 bp, Artificial Sequence
  Description of Artificial Sequence: Synthetic oligonucleotide
  Target: ANGPTL4; (-) strand; PAM type: NRG; PAM sequence: TGG
ctctcgacccacacaagccc

SEQ ID NO: 9101 - DNA, 20 bp, Artificial Sequence
  Description of Artificial Sequence: Synthetic oligonucleotide
  Target: ANGPTL4; (-) strand; PAM type: NRG; PAM sequence: AAG
agggcgctctcgacccacac

SEQ ID NO: 9102 - DNA, 20 bp, Artificial Sequence
  Description of Artificial Sequence: Synthetic oligonucleotide
  Target: ANGPTL4; (-) strand; PAM type: NRG; PAM sequence: GGG
caacagcaccagcaccatga

SEQ ID NO: 9103 - DNA, 20 bp, Artificial Sequence
  Description of Artificial Sequence: Synthetic oligonucleotide
  Target: ANGPTL4; (-) strand; PAM type: NRG; PAM sequence: AGG
acaacagcaccagcaccatg

SEQ ID NO: 9104 - DNA, 20 bp, Artificial Sequence
  Description of Artificial Sequence: Synthetic oligonucleotide
  Target: ANGPTL4; (-) strand; PAM type: NRG; PAM sequence: GAG
cacaacagcaccagcaccat

SEQ ID NO: 9105 - DNA, 20 bp, Artificial Sequence
  Description of Artificial Sequence: Synthetic oligonucleotide
  Target: ANGPTL4; (-) strand; PAM type: NRG; PAM sequence: CAG
ggacctacacacaacagcac

SEQ ID NO: 9106 - DNA, 20 bp, Artificial Sequence
  Description of Artificial Sequence: Synthetic oligonucleotide
  Target: ANGPTL4; (-) strand; PAM type: NRG; PAM sequence: CAG
cccaggggacctacacacaa

SEQ ID NO: 9107 - DNA, 20 bp, Artificial Sequence
  Description of Artificial Sequence: Synthetic oligonucleotide
  Target: ANGPTL4; (-) strand; PAM type: NRG; PAM sequence: GGG
gcgcctgcttgtgtccccag

SEQ ID NO: 9108 - DNA, 20 bp, Artificial Sequence
  Description of Artificial Sequence: Synthetic oligonucleotide
  Target: ANGPTL4; (-) strand; PAM type: NRG; PAM sequence: GGG
ggcgcctgcttgtgtcccca

SEQ ID NO: 9109 - DNA, 20 bp, Artificial Sequence
  Description of Artificial Sequence: Synthetic oligonucleotide
  Target: ANGPTL4; (-) strand; PAM type: NRG; PAM sequence: AGG
tggcgcctgcttgtgtcccc

SEQ ID NO: 9110 - DNA, 20 bp, Artificial Sequence
  Description of Artificial Sequence: Synthetic oligonucleotide
  Target: ANGPTL4; (-) strand; PAM type: NRG; PAM sequence: CAG
ttggcgcctgcttgtgtccc

SEQ ID NO: 9111 - DNA, 20 bp, Artificial Sequence
  Description of Artificial Sequence: Synthetic oligonucleotide
  Target: ANGPTL4; (-) strand; PAM type: NRG; PAM sequence: TGG
gagctccgcccagataccat

SEQ ID NO: 9112 - DNA, 20 bp, Artificial Sequence
  Description of Artificial Sequence: Synthetic oligonucleotide
  Target: ANGPTL4; (-) strand; PAM type: NRG; PAM sequence: CAG
agaactctgtgagctccgcc

SEQ ID NO: 9113 - DNA, 20 bp, Artificial Sequence
  Description of Artificial Sequence: Synthetic oligonucleotide
  Target: ANGPTL4; (-) strand; PAM type: NRG; PAM sequence: GAG
ttttattccaagaactctgt

SEQ ID NO: 9114 - DNA, 20 bp, Artificial Sequence
  Description of Artificial Sequence: Synthetic oligonucleotide
  Target: ANGPTL4; (-) strand; PAM type: NRG; PAM sequence: AAG
tctgaggttgcttttattcc

SEQ ID NO: 9115 - DNA, 20 bp, Artificial Sequence
  Description of Artificial Sequence: Synthetic oligonucleotide
  Target: ANGPTL4; (-) strand; PAM type: NRG; PAM sequence: AGG
acaaagaacaaagtgttctg

SEQ ID NO: 9116 - DNA, 20 bp, Artificial Sequence
  Description of Artificial Sequence: Synthetic oligonucleotide
  Target: ANGPTL4; (-) strand; PAM type: NRG; PAM sequence: GAG
aacaaagaacaaagtgttct

SEQ ID NO: 9117 - DNA, 20 bp, Artificial Sequence
  Description of Artificial Sequence: Synthetic oligonucleotide
  Target: ANGPTL4; (-) strand; PAM type: NRG; PAM sequence: AAG
acaaacaagaacaaagaaca

SEQ ID NO: 9118 - DNA, 20 bp, Artificial Sequence
  Description of Artificial Sequence: Synthetic oligonucleotide
  Target: ANGPTL4; (-) strand; PAM type: NRG; PAM sequence: AAG
aaagaaaacaaacaagaaca

SEQ ID NO: 9119 - DNA, 20 bp, Artificial Sequence
  Description of Artificial Sequence: Synthetic oligonucleotide
  Target: ANGPTL4; (-) strand; PAM type: NRG; PAM sequence: AAG
aaaaaagaaagaaaacaaac

SEQ ID NO: 9120 - DNA, 20 bp, Artificial Sequence
  Description of Artificial Sequence: Synthetic oligonucleotide
  Target: ANGPTL4; (-) strand; PAM type: NRG; PAM sequence: AAG
aaagaaagagaaaaaaaaga

SEQ ID NO: 9121 - DNA, 20 bp, Artificial Sequence
  Description of Artificial Sequence: Synthetic oligonucleotide
  Target: ANGPTL4; (-) strand; PAM type: NRG; PAM sequence: AAG
aactaaagaaagagaaaaaa

SEQ ID NO: 9122 - DNA, 20 bp, Artificial Sequence
  Description of Artificial Sequence: Synthetic oligonucleotide
  Target: ANGPTL4; (-) strand; PAM type: NRG; PAM sequence: GAG
agatctgtgaactaaagaaa

SEQ ID NO: 9123 - DNA, 20 bp, Artificial Sequence
  Description of Artificial Sequence: Synthetic oligonucleotide
  Target: ANGPTL4; (-) strand; PAM type: NRG; PAM sequence: AAG
ctagatctgtgaactaaaga

SEQ ID NO: 9124 - DNA, 20 bp, Artificial Sequence
  Description of Artificial Sequence: Synthetic oligonucleotide
  Target: ANGPTL4; (-) strand; PAM type: NRG; PAM sequence: AAG
cttactagatctgtgaacta

SEQ ID NO: 9125 - DNA, 20 bp, Artificial Sequence
  Description of Artificial Sequence: Synthetic oligonucleotide
  Target: ANGPTL4; (-) strand; PAM type: NRG; PAM sequence: TAG
acaaactgagggtaacttac

SEQ ID NO: 9126 - DNA, 20 bp, Artificial Sequence
  Description of Artificial Sequence: Synthetic oligonucleotide
  Target: ANGPTL4; (-) strand; PAM type: NRG; PAM sequence: GGG
cactttttaaaacaaactga

SEQ ID NO: 9127 - DNA, 20 bp, Artificial Sequence
  Description of Artificial Sequence: Synthetic oligonucleotide
  Target: ANGPTL4; (-) strand; PAM type: NRG; PAM sequence: AGG
tcactttttaaaacaaactg

SEQ ID NO: 9128 - DNA, 20 bp, Artificial Sequence
  Description of Artificial Sequence: Synthetic oligonucleotide
  Target: ANGPTL4; (-) strand; PAM type: NRG; PAM sequence: GAG
ttcactttttaaaacaaact

SEQ ID NO: 9129 - DNA, 20 bp, Artificial Sequence
  Description of Artificial Sequence: Synthetic oligonucleotide
  Target: ANGPTL4; (-) strand; PAM type: NRG; PAM sequence: TGG
gccctgggaacatgtttaca

SEQ ID NO: 9130 - DNA, 20 bp, Artificial Sequence
  Description of Artificial Sequence: Synthetic oligonucleotide
  Target: ANGPTL4; (-) strand; PAM type: NRG; PAM sequence: GGG
gagacaccgtgcctggccct

SEQ ID NO: 9131 - DNA, 20 bp, Artificial Sequence
  Description of Artificial Sequence: Synthetic oligonucleotide
  Target: ANGPTL4; (-) strand; PAM type: NRG; PAM sequence: TGG
cgagacaccgtgcctggccc

SEQ ID NO: 9132 - DNA, 20 bp, Artificial Sequence
  Description of Artificial Sequence: Synthetic oligonucleotide
  Target: ANGPTL4; (-) strand; PAM type: NRG; PAM sequence: TGG
caggcacgagacaccgtgcc

SEQ ID NO: 9133 - DNA, 20 bp, Artificial Sequence
  Description of Artificial Sequence: Synthetic oligonucleotide
  Target: ANGPTL4; (-) strand; PAM type: NRG; PAM sequence: GAG
atggctgggattacaggcac

SEQ ID NO: 9134 - DNA, 20 bp, Artificial Sequence
  Description of Artificial Sequence: Synthetic oligonucleotide
  Target: ANGPTL4; (-) strand; PAM type: NRG; PAM sequence: AGG
tcacaaatggctgggattac

SEQ ID NO: 9135 - DNA, 20 bp, Artificial Sequence
  Description of Artificial Sequence: Synthetic oligonucleotide
  Target: ANGPTL4; (-) strand; PAM type: NRG; PAM sequence: CAG
ctcacaaatggctgggatta

SEQ ID NO: 9136 - DNA, 20 bp, Artificial Sequence
  Description of Artificial Sequence: Synthetic oligonucleotide
  Target: ANGPTL4; (-) strand; PAM type: NRG; PAM sequence: GGG
tctcggcctcacaaatggct

SEQ ID NO: 9137 - DNA, 20 bp, Artificial Sequence
  Description of Artificial Sequence: Synthetic oligonucleotide
  Target: ANGPTL4; (-) strand; PAM type: NRG; PAM sequence: TGG
gtctcggcctcacaaatggc

SEQ ID NO: 9138 - DNA, 20 bp, Artificial Sequence
  Description of Artificial Sequence: Synthetic oligonucleotide
  Target: ANGPTL4; (-) strand; PAM type: NRG; PAM sequence: TGG
gcctgtctcggcctcacaaa

SEQ ID NO: 9139 - DNA, 20 bp, Artificial Sequence
  Description of Artificial Sequence: Synthetic oligonucleotide
  Target: ANGPTL4; (-) strand; PAM type: NRG; PAM sequence: CGG
ctcaagtgacctgcctgtct

SEQ ID NO: 9140 - DNA, 20 bp, Artificial Sequence
  Description of Artificial Sequence: Synthetic oligonucleotide
  Target: ANGPTL4; (-) strand; PAM type: NRG; PAM sequence: AAG
ggtctcgaactgctgacctc

SEQ ID NO: 9141 - DNA, 20 bp, Artificial Sequence
  Description of Artificial Sequence: Synthetic oligonucleotide
  Target: ANGPTL4; (-) strand; PAM type: NRG; PAM sequence: TGG
ttccaccatgttggcccggc

SEQ ID NO: 9142 - DNA, 20 bp, Artificial Sequence
  Description of Artificial Sequence: Synthetic oligonucleotide
  Target: ANGPTL4; (-) strand; PAM type: NRG; PAM sequence: CGG
ggggttccaccatgttggcc

SEQ ID NO: 9143 - DNA, 20 bp, Artificial Sequence
  Description of Artificial Sequence: Synthetic oligonucleotide
  Target: ANGPTL4; (-) strand; PAM type: NRG; PAM sequence: TGG
agatgggggttccaccatgt

SEQ ID NO: 9144 - DNA, 20 bp, Artificial Sequence
  Description of Artificial Sequence: Synthetic oligonucleotide
  Target: ANGPTL4; (-) strand; PAM type: NRG; PAM sequence: GGG
gtatttttttgtagagatgg

SEQ ID NO: 9145 - DNA, 20 bp, Artificial Sequence
  Description of Artificial Sequence: Synthetic oligonucleotide
  Target: ANGPTL4; (-) strand; PAM type: NRG; PAM sequence: GGG
tgtatttttttgtagagatg

SEQ ID NO: 9146 - DNA, 20 bp, Artificial Sequence
  Description of Artificial Sequence: Synthetic oligonucleotide
  Target: ANGPTL4; (-) strand; PAM type: NRG; PAM sequence: GGG
ttgtatttttttgtagagat

SEQ ID NO: 9147 - DNA, 20 bp, Artificial Sequence
  Description of Artificial Sequence: Synthetic oligonucleotide
  Target: ANGPTL4; (-) strand; PAM type: NRG; PAM sequence: TGG
tttgtatttttttgtagaga

SEQ ID NO: 9148 - DNA, 20 bp, Artificial Sequence
  Description of Artificial Sequence: Synthetic oligonucleotide
  Target: ANGPTL4; (-) strand; PAM type: NRG; PAM sequence: GAG
aatttttgtatttttttgta

SEQ ID NO: 9149 - DNA, 20 bp, Artificial Sequence
  Description of Artificial Sequence: Synthetic oligonucleotide
  Target: ANGPTL4; (-) strand; PAM type: NRG; PAM sequence: TAG
ctaatttttgtatttttttg

SEQ ID NO: 9150 - DNA, 20 bp, Artificial Sequence
  Description of Artificial Sequence: Synthetic oligonucleotide
  Target: ANGPTL4; (-) strand; PAM type: NRG; PAM sequence: CGG
cagacgtgcaccaccatgct

SEQ ID NO: 9151 - DNA, 20 bp, Artificial Sequence
  Description of Artificial Sequence: Synthetic oligonucleotide
  Target: ANGPTL4; (-) strand; PAM type: NRG; PAM sequence: CAG
ctctagagtagctgggacta

SEQ ID NO: 9152 - DNA, 20 bp, Artificial Sequence
  Description of Artificial Sequence: Synthetic oligonucleotide
  Target: ANGPTL4; (-) strand; PAM type: NRG; PAM sequence: GGG
cgtcagcctctagagtagct

SEQ ID NO: 9153 - DNA, 20 bp, Artificial Sequence
  Description of Artificial Sequence: Synthetic oligonucleotide
  Target: ANGPTL4; (-) strand; PAM type: NRG; PAM sequence: TGG
gcgtcagcctctagagtagc

SEQ ID NO: 9154 - DNA, 20 bp, Artificial Sequence
  Description of Artificial Sequence: Synthetic oligonucleotide
  Target: ANGPTL4; (-) strand; PAM type: NRG; PAM sequence: TAG
ttctgcgtcagcctctagag

SEQ ID NO: 9155 - DNA, 20 bp, Artificial Sequence
  Description of Artificial Sequence: Synthetic oligonucleotide
  Target: ANGPTL4; (-) strand; PAM type: NRG; PAM sequence: GAG
ttcttctgcgtcagcctcta

SEQ ID NO: 9156 - DNA, 20 bp, Artificial Sequence
  Description of Artificial Sequence: Synthetic oligonucleotide
  Target: ANGPTL4; (-) strand; PAM type: NRG; PAM sequence: TAG
gattcttctgcgtcagcctc

SEQ ID NO: 9157 - DNA, 20 bp, Artificial Sequence
  Description of Artificial Sequence: Synthetic oligonucleotide
  Target: ANGPTL4; (-) strand; PAM type: NRG; PAM sequence: CAG
ctcaagtgattcttctgcgt

SEQ ID NO: 9158 - DNA, 20 bp, Artificial Sequence
  Description of Artificial Sequence: Synthetic oligonucleotide
  Target: ANGPTL4; (-) strand; PAM type: NRG; PAM sequence: AAG
agcctctgcctccttggctc

SEQ ID NO: 9159 - DNA, 20 bp, Artificial Sequence
  Description of Artificial Sequence: Synthetic oligonucleotide
  Target: ANGPTL4; (-) strand; PAM type: NRG; PAM sequence: TGG
atttgcagcctctgcctcct

SEQ ID NO: 9160 - DNA, 20 bp, Artificial Sequence
  Description of Artificial Sequence: Synthetic oligonucleotide
  Target: ANGPTL4; (-) strand; PAM type: NRG; PAM sequence: CAG
gcgcaatctcggcttatttg

SEQ ID NO: 9161 - DNA, 20 bp, Artificial Sequence
  Description of Artificial Sequence: Synthetic oligonucleotide
  Target: ANGPTL4; (-) strand; PAM type: NRG; PAM sequence: CGG
ggagtgcagtggcgcaatct

SEQ ID NO: 9162 - DNA, 20 bp, Artificial Sequence
  Description of Artificial Sequence: Synthetic oligonucleotide
  Target: ANGPTL4; (-) strand; PAM type: NRG; PAM sequence: TGG
ttgcccaggctggagtgcag

SEQ ID NO: 9163 - DNA, 20 bp, Artificial Sequence
  Description of Artificial Sequence: Synthetic oligonucleotide
  Target: ANGPTL4; (-) strand; PAM type: NRG; PAM sequence: CAG
ctgttgcccaggctggagtg

SEQ ID NO: 9164 - DNA, 20 bp, Artificial Sequence
  Description of Artificial Sequence: Synthetic oligonucleotide
  Target: ANGPTL4; (-) strand; PAM type: NRG; PAM sequence: GAG
ttgctctgttgcccaggctg

SEQ ID NO: 9165 - DNA, 20 bp, Artificial Sequence
  Description of Artificial Sequence: Synthetic oligonucleotide
  Target: ANGPTL4; (-) strand; PAM type: NRG; PAM sequence: TGG
tcttgctctgttgcccaggc

SEQ ID NO: 9166 - DNA, 20 bp, Artificial Sequence
  Description of Artificial Sequence: Synthetic oligonucleotide
  Target: ANGPTL4; (-) strand; PAM type: NRG; PAM sequence: AGG
ggagtcttgctctgttgccc

SEQ ID NO: 9167 - DNA, 20 bp, Artificial Sequence
  Description of Artificial Sequence: Synthetic oligonucleotide
  Target: ANGPTL4; (-) strand; PAM type: NRG; PAM sequence: CAG
tggagtcttgctctgttgcc

SEQ ID NO: 9168 - DNA, 20 bp, Artificial Sequence
  Description of Artificial Sequence: Synthetic oligonucleotide
  Target: ANGPTL4; (-) strand; PAM type: NRG; PAM sequence: GAG
attatttttgttttgagatg

SEQ ID NO: 9169 - DNA, 20 bp, Artificial Sequence
  Description of Artificial Sequence: Synthetic oligonucleotide
  Target: ANGPTL4; (-) strand; PAM type: NRG; PAM sequence: TGG
aaattatttttgttttgaga

SEQ ID NO: 9170 - DNA, 20 bp, Artificial Sequence
  Description of Artificial Sequence: Synthetic oligonucleotide
  Target: ANGPTL4; (-) strand; PAM type: NRG; PAM sequence: GAG
aaaaaaattatttttgtttt

SEQ ID NO: 9171 - DNA, 20 bp, Artificial Sequence
  Description of Artificial Sequence: Synthetic oligonucleotide
  Target: ANGPTL4; (-) strand; PAM type: NRG; PAM sequence: GAG
accagcctggacaatagaat

SEQ ID NO: 9172 - DNA, 20 bp, Artificial Sequence
  Description of Artificial Sequence: Synthetic oligonucleotide
  Target: ANGPTL4; (-) strand; PAM type: NRG; PAM sequence: TAG
tttgagaccagcctggacaa

SEQ ID NO: 9173 - DNA, 20 bp, Artificial Sequence
  Description of Artificial Sequence: Synthetic oligonucleotide
  Target: ANGPTL4; (-) strand; PAM type: NRG; PAM sequence: TGG
ctcggtgtttgagaccagcc

SEQ ID NO: 9174 - DNA, 20 bp, Artificial Sequence
  Description of Artificial Sequence: Synthetic oligonucleotide
  Target: ANGPTL4; (-) strand; PAM type: NRG; PAM sequence: CAG
tgagtctcggtgtttgagac

SEQ ID NO: 9175 - DNA, 20 bp, Artificial Sequence
  Description of Artificial Sequence: Synthetic oligonucleotide
  Target: ANGPTL4; (-) strand; PAM type: NRG; PAM sequence: GAG
tcccttgagtctcggtgttt

SEQ ID NO: 9176 - DNA, 20 bp, Artificial Sequence
  Description of Artificial Sequence: Synthetic oligonucleotide
  Target: ANGPTL4; (-) strand; PAM type: NRG; PAM sequence: CGG
caggaggatcccttgagtct

SEQ ID NO: 9177 - DNA, 20 bp, Artificial Sequence
  Description of Artificial Sequence: Synthetic oligonucleotide
  Target: ANGPTL4; (-) strand; PAM type: NRG; PAM sequence: GAG
ccaaggcaggaggatccctt

SEQ ID NO: 9178 - DNA, 20 bp, Artificial Sequence
  Description of Artificial Sequence: Synthetic oligonucleotide
  Target: ANGPTL4; (-) strand; PAM type: NRG; PAM sequence: AGG
ctttgtgaagccaaggcagg

SEQ ID NO: 9179 - DNA, 20 bp, Artificial Sequence
  Description of Artificial Sequence: Synthetic oligonucleotide
  Target: ANGPTL4; (-) strand; PAM type: NRG; PAM sequence: GAG
actttgtgaagccaaggcag

SEQ ID NO: 9180 - DNA, 20 bp, Artificial Sequence
  Description of Artificial Sequence: Synthetic oligonucleotide
  Target: ANGPTL4; (-) strand; PAM type: NRG; PAM sequence: AGG
tcactttgtgaagccaaggc

SEQ ID NO: 9181 - DNA, 20 bp, Artificial Sequence
  Description of Artificial Sequence: Synthetic oligonucleotide
  Target: ANGPTL4; (-) strand; PAM type: NRG; PAM sequence: CAG
atcactttgtgaagccaagg

SEQ ID NO: 9182 - DNA, 20 bp, Artificial Sequence
  Description of Artificial Sequence: Synthetic oligonucleotide
  Target: ANGPTL4; (-) strand; PAM type: NRG; PAM sequence: AGG
cccatcactttgtgaagcca

SEQ ID NO: 9183 - DNA, 20 bp, Artificial Sequence
  Description of Artificial Sequence: Synthetic oligonucleotide
  Target: ANGPTL4; (-) strand; PAM type: NRG; PAM sequence: AAG
tcccatcactttgtgaagcc

SEQ ID NO: 9184 - DNA, 20 bp, Artificial Sequence
  Description of Artificial Sequence: Synthetic oligonucleotide
  Target: ANGPTL4; (-) strand; PAM type: NRG; PAM sequence: AAG
tttaatcccatcactttgtg

SEQ ID NO: 9185 - DNA, 20 bp, Artificial Sequence
  Description of Artificial Sequence: Synthetic oligonucleotide
  Target: ANGPTL4; (-) strand; PAM type: NRG; PAM sequence: TGG
gccttcaggggtgggtgcag

SEQ ID NO: 9186 - DNA, 20 bp, Artificial Sequence
  Description of Artificial Sequence: Synthetic oligonucleotide
  Target: ANGPTL4; (-) strand; PAM type: NRG; PAM sequence: CAG
agagccttcaggggtgggtg

SEQ ID NO: 9187 - DNA, 20 bp, Artificial Sequence
  Description of Artificial Sequence: Synthetic oligonucleotide
  Target: ANGPTL4; (-) strand; PAM type: NRG; PAM sequence: GGG
gaattagagccttcaggggt

SEQ ID NO: 9188 - DNA, 20 bp, Artificial Sequence
  Description of Artificial Sequence: Synthetic oligonucleotide
  Target: ANGPTL4; (-) strand; PAM type: NRG; PAM sequence: TGG
agaattagagccttcagggg

SEQ ID NO: 9189 - DNA, 20 bp, Artificial Sequence
  Description of Artificial Sequence: Synthetic oligonucleotide
  Target: ANGPTL4; (-) strand; PAM type: NRG; PAM sequence: GGG
tgtagaattagagccttcag

SEQ ID NO: 9190 - DNA, 20 bp, Artificial Sequence
  Description of Artificial Sequence: Synthetic oligonucleotide
  Target: ANGPTL4; (-) strand; PAM type: NRG; PAM sequence: GGG
atgtagaattagagccttca

SEQ ID NO: 9191 - DNA, 20 bp, Artificial Sequence
  Description of Artificial Sequence: Synthetic oligonucleotide
  Target: ANGPTL4; (-) strand; PAM type: NRG; PAM sequence: AGG
gatgtagaattagagccttc

SEQ ID NO: 9192 - DNA, 20 bp, Artificial Sequence
  Description of Artificial Sequence: Synthetic oligonucleotide
  Target: ANGPTL4; (-) strand; PAM type: NRG; PAM sequence: CAG
agatgtagaattagagcctt

SEQ ID NO: 9193 - DNA, 20 bp, Artificial Sequence
  Description of Artificial Sequence: Synthetic oligonucleotide
  Target: ANGPTL4; (-) strand; PAM type: NRG; PAM sequence: GAG
aaaacacagatgtagaatta

SEQ ID NO: 9194 - DNA, 20 bp, Artificial Sequence
  Description of Artificial Sequence: Synthetic oligonucleotide
  Target: ANGPTL4; (-) strand; PAM type: NRG; PAM sequence: TAG
acaaaacacagatgtagaat

SEQ ID NO: 9195 - DNA, 20 bp, Artificial Sequence
  Description of Artificial Sequence: Synthetic oligonucleotide
  Target: ANGPTL4; (-) strand; PAM type: NRG; PAM sequence: TAG
tttttaacaaaacacagatg

SEQ ID NO: 9196 - DNA, 20 bp, Artificial Sequence
  Description of Artificial Sequence: Synthetic oligonucleotide
  Target: ANGPTL4; (-) strand; PAM type: NRG; PAM sequence: CAG
tttttttttttaacaaaaca

SEQ ID NO: 9197 - DNA, 20 bp, Artificial Sequence
  Description of Artificial Sequence: Synthetic oligonucleotide
  Target: ANGPTL4; (-) strand; PAM type: NRG; PAM sequence: GAG
agtgctgggattacaggcat

SEQ ID NO: 9198 - DNA, 20 bp, Artificial Sequence
  Description of Artificial Sequence: Synthetic oligonucleotide
  Target: ANGPTL4; (-) strand; PAM type: NRG; PAM sequence: AGG
tcctaaagtgctgggattac

SEQ ID NO: 9199 - DNA, 20 bp, Artificial Sequence
  Description of Artificial Sequence: Synthetic oligonucleotide
  Target: ANGPTL4; (-) strand; PAM type: NRG; PAM sequence: CAG
ctcctaaagtgctgggatta

SEQ ID NO: 9200 - DNA, 20 bp, Artificial Sequence
  Description of Artificial Sequence: Synthetic oligonucleotide
  Target: ANGPTL4; (-) strand; PAM type: NRG; PAM sequence: GGG
cctcggcctcctaaagtgct

SEQ ID NO: 9201 - DNA, 20 bp, Artificial Sequence
  Description of Artificial Sequence: Synthetic oligonucleotide
  Target: ANGPTL4; (-) strand; PAM type: NRG; PAM sequence: TGG
gcctcggcctcctaaagtgc

SEQ ID NO: 9202 - DNA, 20 bp, Artificial Sequence
  Description of Artificial Sequence: Synthetic oligonucleotide
  Target: ANGPTL4; (-) strand; PAM type: NRG; PAM sequence: AAG
ccacctgcctcggcctccta

SEQ ID NO: 9203 - DNA, 20 bp, Artificial Sequence
  Description of Artificial Sequence: Synthetic oligonucleotide
  Target: ANGPTL4; (-) strand; PAM type: NRG; PAM sequence: CGG
gtcagatgatccacctgcct

SEQ ID NO: 9204 - DNA, 20 bp, Artificial Sequence
  Description of Artificial Sequence: Synthetic oligonucleotide
  Target: ANGPTL4; (-) strand; PAM type: NRG; PAM sequence: CAG
gggcctggaactcgtaatgt

SEQ ID NO: 9205 - DNA, 20 bp, Artificial Sequence
  Description of Artificial Sequence: Synthetic oligonucleotide
  Target: ANGPTL4; (-) strand; PAM type: NRG; PAM sequence: TGG
ccatgttggtcaggcgggcc

SEQ ID NO: 9206 - DNA, 20 bp, Artificial Sequence
  Description of Artificial Sequence: Synthetic oligonucleotide
  Target: ANGPTL4; (-) strand; PAM type: NRG; PAM sequence: GGG
tttcaccatgttggtcaggc

SEQ ID NO: 9207 - DNA, 20 bp, Artificial Sequence
  Description of Artificial Sequence: Synthetic oligonucleotide
  Target: ANGPTL4; (-) strand; PAM type: NRG; PAM sequence: CGG
gtttcaccatgttggtcagg

SEQ ID NO: 9208 - DNA, 20 bp, Artificial Sequence
  Description of Artificial Sequence: Synthetic oligonucleotide
  Target: ANGPTL4; (-) strand; PAM type: NRG; PAM sequence: AGG
ggggtttcaccatgttggtc

SEQ ID NO: 9209 - DNA, 20 bp, Artificial Sequence
  Description of Artificial Sequence: Synthetic oligonucleotide
  Target: ANGPTL4; (-) strand; PAM type: NRG; PAM sequence: CAG
cggggtttcaccatgttggt

SEQ ID NO: 9210 - DNA, 20 bp, Artificial Sequence
  Description of Artificial Sequence: Synthetic oligonucleotide
  Target: ANGPTL4; (-) strand; PAM type: NRG; PAM sequence: TGG
gagacggggtttcaccatgt

SEQ ID NO: 9211 - DNA, 20 bp, Artificial Sequence
  Description of Artificial Sequence: Synthetic oligonucleotide
  Target: ANGPTL4; (-) strand; PAM type: NRG; PAM sequence: GGG
ttgtatttttagtagagacg

SEQ ID NO: 9212 - DNA, 20 bp, Artificial Sequence
  Description of Artificial Sequence: Synthetic oligonucleotide
  Target: ANGPTL4; (-) strand; PAM type: NRG; PAM sequence: GGG
tttgtatttttagtagagac

SEQ ID NO: 9213 - DNA, 20 bp, Artificial Sequence
  Description of Artificial Sequence: Synthetic oligonucleotide
  Target: ANGPTL4; (-) strand; PAM type: NRG; PAM sequence: CGG
ttttgtatttttagtagaga

SEQ ID NO: 9214 - DNA, 20 bp, Artificial Sequence
  Description of Artificial Sequence: Synthetic oligonucleotide
  Target: ANGPTL4; (-) strand; PAM type: NRG; PAM sequence: GAG
taatttttgtatttttagta

SEQ ID NO: 9215 - DNA, 20 bp, Artificial Sequence
  Description of Artificial Sequence: Synthetic oligonucleotide
  Target: ANGPTL4; (-) strand; PAM type: NRG; PAM sequence: TAG
gctaatttttgtatttttag

SEQ ID NO: 9216 - DNA, 20 bp, Artificial Sequence
  Description of Artificial Sequence: Synthetic oligonucleotide
  Target: ANGPTL4; (-) strand; PAM type: NRG; PAM sequence: TAG
ccggctaatttttgtatttt

SEQ ID NO: 9217 - DNA, 20 bp, Artificial Sequence
  Description of Artificial Sequence: Synthetic oligonucleotide
  Target: ANGPTL4; (-) strand; PAM type: NRG; PAM sequence: CGG
caggcacccgccaccacacc

SEQ ID NO: 9218 - DNA, 20 bp, Artificial Sequence
  Description of Artificial Sequence: Synthetic oligonucleotide
  Target: ANGPTL4; (-) strand; PAM type: NRG; PAM sequence: AGG
tcctgagtagctgggattac

SEQ ID NO: 9219 - DNA, 20 bp, Artificial Sequence
  Description of Artificial Sequence: Synthetic oligonucleotide
  Target: ANGPTL4; (-) strand; PAM type: NRG; PAM sequence: CAG
ctcctgagtagctgggatta

SEQ ID NO: 9220 - DNA, 20 bp, Artificial Sequence
  Description of Artificial Sequence: Synthetic oligonucleotide
  Target: ANGPTL4; (-) strand; PAM type: NRG; PAM sequence: GGG
cctcagcctcctgagtagct

SEQ ID NO: 9221 - DNA, 20 bp, Artificial Sequence
  Description of Artificial Sequence: Synthetic oligonucleotide
  Target: ANGPTL4; (-) strand; PAM type: NRG; PAM sequence: TGG
gcctcagcctcctgagtagc

SEQ ID NO: 9222 - DNA, 20 bp, Artificial Sequence
  Description of Artificial Sequence: Synthetic oligonucleotide
  Target: ANGPTL4; (-) strand; PAM type: NRG; PAM sequence: TAG
tcctgcctcagcctcctgag

SEQ ID NO: 9223 - DNA, 20 bp, Artificial Sequence
  Description of Artificial Sequence: Synthetic oligonucleotide
  Target: ANGPTL4; (-) strand; PAM type: NRG; PAM sequence: GAG
ttctcctgcctcagcctcct

SEQ ID NO: 9224 - DNA, 20 bp, Artificial Sequence
  Description of Artificial Sequence: Synthetic oligonucleotide
  Target: ANGPTL4; (-) strand; PAM type: NRG; PAM sequence: CAG
ttcaagtgattctcctgcct

SEQ ID NO: 9225 - DNA, 20 bp, Artificial Sequence
  Description of Artificial Sequence: Synthetic oligonucleotide
  Target: ANGPTL4; (-) strand; PAM type: NRG; PAM sequence: AAG
aacctccacctcccgagttc

SEQ ID NO: 9226 - DNA, 20 bp, Artificial Sequence
  Description of Artificial Sequence: Synthetic oligonucleotide
  Target: ANGPTL4; (-) strand; PAM type: NRG; PAM sequence: GAG
caccgcaacctccacctccc

SEQ ID NO: 9227 - DNA, 20 bp, Artificial Sequence
  Description of Artificial Sequence: Synthetic oligonucleotide
  Target: ANGPTL4; (-) strand; PAM type: NRG; PAM sequence: TGG
tcacccaggctggagtgcag

SEQ ID NO: 9228 - DNA, 20 bp, Artificial Sequence
  Description of Artificial Sequence: Synthetic oligonucleotide
  Target: ANGPTL4; (-) strand; PAM type: NRG; PAM sequence: CAG
ctgtcacccaggctggagtg

SEQ ID NO: 9229 - DNA, 20 bp, Artificial Sequence
  Description of Artificial Sequence: Synthetic oligonucleotide
  Target: ANGPTL4; (-) strand; PAM type: NRG; PAM sequence: GAG
ttgctctgtcacccaggctg

SEQ ID NO: 9230 - DNA, 20 bp, Artificial Sequence
  Description of Artificial Sequence: Synthetic oligonucleotide
  Target: ANGPTL4; (-) strand; PAM type: NRG; PAM sequence: TGG
tcttgctctgtcacccaggc

SEQ ID NO: 9231 - DNA, 20 bp, Artificial Sequence
  Description of Artificial Sequence: Synthetic oligonucleotide
  Target: ANGPTL4; (-) strand; PAM type: NRG; PAM sequence: AGG
caagtcttgctctgtcaccc

SEQ ID NO: 9232 - DNA, 20 bp, Artificial Sequence
  Description of Artificial Sequence: Synthetic oligonucleotide
  Target: ANGPTL4; (-) strand; PAM type: NRG; PAM sequence: CAG
tcaagtcttgctctgtcacc

SEQ ID NO: 9233 - DNA, 20 bp, Artificial Sequence
  Description of Artificial Sequence: Synthetic oligonucleotide
  Target: ANGPTL4; (-) strand; PAM type: NRG; PAM sequence: AAG
ttttttttttttttgaaatc

SEQ ID NO: 9234 - DNA, 20 bp, Artificial Sequence
  Description of Artificial Sequence: Synthetic oligonucleotide
  Target: ANGPTL4; (-) strand; PAM type: NRG; PAM sequence: CAG
caagtgtgagccaatgcgcc

SEQ ID NO: 9235 - DNA, 20 bp, Artificial Sequence
  Description of Artificial Sequence: Synthetic oligonucleotide
  Target: ANGPTL4; (-) strand; PAM type: NRG; PAM sequence: GAG
agtgctagtgttacaagtgt

SEQ ID NO: 9236 - DNA, 20 bp, Artificial Sequence
  Description of Artificial Sequence: Synthetic oligonucleotide
  Target: ANGPTL4; (-) strand; PAM type: NRG; PAM sequence: AAG
tcccaaagtgctagtgttac

SEQ ID NO: 9237 - DNA, 20 bp, Artificial Sequence
  Description of Artificial Sequence: Synthetic oligonucleotide
  Target: ANGPTL4; (-) strand; PAM type: NRG; PAM sequence: TAG
tcgttggcctcccaaagtgc

SEQ ID NO: 9238 - DNA, 20 bp, Artificial Sequence
  Description of Artificial Sequence: Synthetic oligonucleotide
  Target: ANGPTL4; (-) strand; PAM type: NRG; PAM sequence: AAG
atccgctcgttggcctccca

SEQ ID NO: 9239 - DNA, 20 bp, Artificial Sequence
  Description of Artificial Sequence: Synthetic oligonucleotide
  Target: ANGPTL4; (-) strand; PAM type: NRG; PAM sequence: TGG
acctcgggtgatccgctcgt

SEQ ID NO: 9240 - DNA, 20 bp, Artificial Sequence
  Description of Artificial Sequence: Synthetic oligonucleotide
  Target: ANGPTL4; (-) strand; PAM type: NRG; PAM sequence: GGG
cagcgggatcacccgacctc

SEQ ID NO: 9241 - DNA, 20 bp, Artificial Sequence
  Description of Artificial Sequence: Synthetic oligonucleotide
  Target: ANGPTL4; (-) strand; PAM type: NRG; PAM sequence: CGG
acagcgggatcacccgacct

SEQ ID NO: 9242 - DNA, 20 bp, Artificial Sequence
  Description of Artificial Sequence: Synthetic oligonucleotide
  Target: ANGPTL4; (-) strand; PAM type: NRG; PAM sequence: GGG
actatatagagcaatacagc

SEQ ID NO: 9243 - DNA, 20 bp, Artificial Sequence
  Description of Artificial Sequence: Synthetic oligonucleotide
  Target: ANGPTL4; (-) strand; PAM type: NRG; PAM sequence: CGG
cactatatagagcaatacag

SEQ ID NO: 9244 - DNA, 20 bp, Artificial Sequence
  Description of Artificial Sequence: Synthetic oligonucleotide
  Target: ANGPTL4; (-) strand; PAM type: NRG; PAM sequence: CAG
tctcactatatagagcaata

SEQ ID NO: 9245 - DNA, 20 bp, Artificial Sequence
  Description of Artificial Sequence: Synthetic oligonucleotide
  Target: ANGPTL4; (-) strand; PAM type: NRG; PAM sequence: GAG
tatagggatctcactatata

SEQ ID NO: 9246 - DNA, 20 bp, Artificial Sequence
  Description of Artificial Sequence: Synthetic oligonucleotide
  Target: ANGPTL4; (-) strand; PAM type: NRG; PAM sequence: TAG
tatatagggatctcactata

SEQ ID NO: 9247 - DNA, 20 bp, Artificial Sequence
  Description of Artificial Sequence: Synthetic oligonucleotide
  Target: ANGPTL4; (-) strand; PAM type: NRG; PAM sequence: GGG
atagagtgagaccctatata

SEQ ID NO: 9248 - DNA, 20 bp, Artificial Sequence
  Description of Artificial Sequence: Synthetic oligonucleotide
  Target: ANGPTL4; (-) strand; PAM type: NRG; PAM sequence: AGG
aatagagtgagaccctatat

SEQ ID NO: 9249 - DNA, 20 bp, Artificial Sequence
  Description of Artificial Sequence: Synthetic oligonucleotide
  Target: ANGPTL4; (-) strand; PAM type: NRG; PAM sequence: TAG
caatagagtgagaccctata

SEQ ID NO: 9250 - DNA, 20 bp, Artificial Sequence
  Description of Artificial Sequence: Synthetic oligonucleotide
  Target: ANGPTL4; (-) strand; PAM type: NRG; PAM sequence: GAG
accagcctggacaatagagt

SEQ ID NO: 9251 - DNA, 20 bp, Artificial Sequence
  Description of Artificial Sequence: Synthetic oligonucleotide
  Target: ANGPTL4; (-) strand; PAM type: NRG; PAM sequence: GAG
ccagaccagcctggacaata

SEQ ID NO: 9252 - DNA, 20 bp, Artificial Sequence
  Description of Artificial Sequence: Synthetic oligonucleotide
  Target: ANGPTL4; (-) strand; PAM type: NRG; PAM sequence: TAG
ggccagaccagcctggacaa

SEQ ID NO: 9253 - DNA, 20 bp, Artificial Sequence
  Description of Artificial Sequence: Synthetic oligonucleotide
  Target: ANGPTL4; (-) strand; PAM type: NRG; PAM sequence: TGG
ttggccaggccagaccagcc

SEQ ID NO: 9254 - DNA, 20 bp, Artificial Sequence
  Description of Artificial Sequence: Synthetic oligonucleotide
  Target: ANGPTL4; (-) strand; PAM type: NRG; PAM sequence: CAG
ccacattggccaggccagac

SEQ ID NO: 9255 - DNA, 20 bp, Artificial Sequence
  Description of Artificial Sequence: Synthetic oligonucleotide
  Target: ANGPTL4; (-) strand; PAM type: NRG; PAM sequence: CAG
tttcaccacattggccaggc

SEQ ID NO: 9256 - DNA, 20 bp, Artificial Sequence
  Description of Artificial Sequence: Synthetic oligonucleotide
  Target: ANGPTL4; (-) strand; PAM type: NRG; PAM sequence: AGG
gaggtttcaccacattggcc

SEQ ID NO: 9257 - DNA, 20 bp, Artificial Sequence
  Description of Artificial Sequence: Synthetic oligonucleotide
  Target: ANGPTL4; (-) strand; PAM type: NRG; PAM sequence: CAG
tgaggtttcaccacattggc

SEQ ID NO: 9258 - DNA, 20 bp, Artificial Sequence
  Description of Artificial Sequence: Synthetic oligonucleotide
  Target: ANGPTL4; (-) strand; PAM type: NRG; PAM sequence: TGG
gaaatgaggtttcaccacat

SEQ ID NO: 9259 - DNA, 20 bp, Artificial Sequence
  Description of Artificial Sequence: Synthetic oligonucleotide
  Target: ANGPTL4; (-) strand; PAM type: NRG; PAM sequence: AGG
ttgtatttttagtagaaatg

SEQ ID NO: 9260 - DNA, 20 bp, Artificial Sequence
  Description of Artificial Sequence: Synthetic oligonucleotide
  Target: ANGPTL4; (-) strand; PAM type: NRG; PAM sequence: GAG
tttgtatttttagtagaaat

SEQ ID NO: 9261 - DNA, 20 bp, Artificial Sequence
  Description of Artificial Sequence: Synthetic oligonucleotide
  Target: ANGPTL4; (-) strand; PAM type: NRG; PAM sequence: TAG
gctaatttttgtatttttag

SEQ ID NO: 9262 - DNA, 20 bp, Artificial Sequence
  Description of Artificial Sequence: Synthetic oligonucleotide
  Target: ANGPTL4; (-) strand; PAM type: NRG; PAM sequence: TAG
ccagctaatttttgtatttt

SEQ ID NO: 9263 - DNA, 20 bp, Artificial Sequence
  Description of Artificial Sequence: Synthetic oligonucleotide
  Target: ANGPTL4; (-) strand; PAM type: NRG; PAM sequence: CAG
taggtgcgcatcactatgcc

SEQ ID NO: 9264 - DNA, 20 bp, Artificial Sequence
  Description of Artificial Sequence: Synthetic oligonucleotide
  Target: ANGPTL4; (-) strand; PAM type: NRG; PAM sequence: AGG
tcctgagtagctgggattat

SEQ ID NO: 9265 - DNA, 20 bp, Artificial Sequence
  Description of Artificial Sequence: Synthetic oligonucleotide
  Target: ANGPTL4; (-) strand; PAM type: NRG; PAM sequence: TAG
ctcctgagtagctgggatta

SEQ ID NO: 9266 - DNA, 20 bp, Artificial Sequence
  Description of Artificial Sequence: Synthetic oligonucleotide
  Target: ANGPTL4; (-) strand; PAM type: NRG; PAM sequence: GGG
cctcagcctcctgagtagct

SEQ ID NO: 9267 - DNA, 20 bp, Artificial Sequence
  Description of Artificial Sequence: Synthetic oligonucleotide
  Target: ANGPTL4; (-) strand; PAM type: NRG; PAM sequence: TGG
gcctcagcctcctgagtagc

SEQ ID NO: 9268 - DNA, 20 bp, Artificial Sequence
  Description of Artificial Sequence: Synthetic oligonucleotide
  Target: ANGPTL4; (-) strand; PAM type: NRG; PAM sequence: TAG
tccggcctcagcctcctgag

SEQ ID NO: 9269 - DNA, 20 bp, Artificial Sequence
  Description of Artificial Sequence: Synthetic oligonucleotide
  Target: ANGPTL4; (-) strand; PAM type: NRG; PAM sequence: GAG
ttctccggcctcagcctcct

SEQ ID NO: 9270 - DNA, 20 bp, Artificial Sequence
  Description of Artificial Sequence: Synthetic oligonucleotide
  Target: ANGPTL4; (-) strand; PAM type: NRG; PAM sequence: CAG
ttcaagcaattctccggcct

SEQ ID NO: 9271 - DNA, 20 bp, Artificial Sequence
  Description of Artificial Sequence: Synthetic oligonucleotide
  Target: ANGPTL4; (-) strand; PAM type: NRG; PAM sequence: CGG
cctgggttcaagcaattctc

SEQ ID NO: 9272 - DNA, 20 bp, Artificial Sequence
  Description of Artificial Sequence: Synthetic oligonucleotide
  Target: ANGPTL4; (-) strand; PAM type: NRG; PAM sequence: AAG
aacctccacctcctgggttc

SEQ ID NO: 9273 - DNA, 20 bp, Artificial Sequence
  Description of Artificial Sequence: Synthetic oligonucleotide
  Target: ANGPTL4; (-) strand; PAM type: NRG; PAM sequence: GGG
cactgcaacctccacctcct

SEQ ID NO: 9274 - DNA, 20 bp, Artificial Sequence
  Description of Artificial Sequence: Synthetic oligonucleotide
  Target: ANGPTL4; (-) strand; PAM type: NRG; PAM sequence: TGG
tcactgcaacctccacctcc

SEQ ID NO: 9275 - DNA, 20 bp, Artificial Sequence
  Description of Artificial Sequence: Synthetic oligonucleotide
  Target: ANGPTL4; (-) strand; PAM type: NRG; PAM sequence: CGG
gtcacctctcagcgccatct

SEQ ID NO: 9276 - DNA, 20 bp, Artificial Sequence
  Description of Artificial Sequence: Synthetic oligonucleotide
  Target: ANGPTL4; (-) strand; PAM type: NRG; PAM sequence: CAG
gccagcacgctgtcacctct

SEQ ID NO: 9277 - DNA, 20 bp, Artificial Sequence
  Description of Artificial Sequence: Synthetic oligonucleotide
  Target: ANGPTL4; (-) strand; PAM type: NRG; PAM sequence: CAG
gcgagggctgtgaggactgc

SEQ ID NO: 9278 - DNA, 20 bp, Artificial Sequence
  Description of Artificial Sequence: Synthetic oligonucleotide
  Target: ANGPTL4; (-) strand; PAM type: NRG; PAM sequence: AGG
gagagtgagcgagggctgtg

SEQ ID NO: 9279 - DNA, 20 bp, Artificial Sequence
  Description of Artificial Sequence: Synthetic oligonucleotide
  Target: ANGPTL4; (-) strand; PAM type: NRG; PAM sequence: GAG
agagagtgagcgagggctgt

SEQ ID NO: 9280 - DNA, 20 bp, Artificial Sequence
  Description of Artificial Sequence: Synthetic oligonucleotide
  Target: ANGPTL4; (-) strand; PAM type: NRG; PAM sequence: GGG
gagtcgcagagagtgagcga

SEQ ID NO: 9281 - DNA, 20 bp, Artificial Sequence
  Description of Artificial Sequence: Synthetic oligonucleotide
  Target: ANGPTL4; (-) strand; PAM type: NRG; PAM sequence: AGG
ggagtcgcagagagtgagcg

SEQ ID NO: 9282 - DNA, 20 bp, Artificial Sequence
  Description of Artificial Sequence: Synthetic oligonucleotide
  Target: ANGPTL4; (-) strand; PAM type: NRG; PAM sequence: GAG
aggagtcgcagagagtgagc

SEQ ID NO: 9283 - DNA, 20 bp, Artificial Sequence
  Description of Artificial Sequence: Synthetic oligonucleotide
  Target: ANGPTL4; (-) strand; PAM type: NRG; PAM sequence: GAG
gcagaggagtcgcagagagt

SEQ ID NO: 9284 - DNA, 20 bp, Artificial Sequence
  Description of Artificial Sequence: Synthetic oligonucleotide
  Target: ANGPTL4; (-) strand; PAM type: NRG; PAM sequence: GAG
ccaggcagaggagtcgcaga

SEQ ID NO: 9285 - DNA, 20 bp, Artificial Sequence
  Description of Artificial Sequence: Synthetic oligonucleotide
  Target: ANGPTL4; (-) strand; PAM type: NRG; PAM sequence: GAG
gcccaggcagaggagtcgca

SEQ ID NO: 9286 - DNA, 20 bp, Artificial Sequence
  Description of Artificial Sequence: Synthetic oligonucleotide
  Target: ANGPTL4; (-) strand; PAM type: NRG; PAM sequence: CAG
gagcccaggcagaggagtcg

SEQ ID NO: 9287 - DNA, 20 bp, Artificial Sequence
  Description of Artificial Sequence: Synthetic oligonucleotide
  Target: ANGPTL4; (-) strand; PAM type: NRG; PAM sequence: GAG
cagtgggagcccaggcagag

SEQ ID NO: 9288 - DNA, 20 bp, Artificial Sequence
  Description of Artificial Sequence: Synthetic oligonucleotide
  Target: ANGPTL4; (-) strand; PAM type: NRG; PAM sequence: AGG
cacagtgggagcccaggcag

SEQ ID NO: 9289 - DNA, 20 bp, Artificial Sequence
  Description of Artificial Sequence: Synthetic oligonucleotide
  Target: ANGPTL4; (-) strand; PAM type: NRG; PAM sequence: GAG
ccacagtgggagcccaggca

SEQ ID NO: 9290 - DNA, 20 bp, Artificial Sequence
  Description of Artificial Sequence: Synthetic oligonucleotide
  Target: ANGPTL4; (-) strand; PAM type: NRG; PAM sequence: CAG
cgccacagtgggagcccagg

SEQ ID NO: 9291 - DNA, 20 bp, Artificial Sequence
  Description of Artificial Sequence: Synthetic oligonucleotide
  Target: ANGPTL4; (-) strand; PAM type: NRG; PAM sequence: AGG
tgccgccacagtgggagccc

SEQ ID NO: 9292 - DNA, 20 bp, Artificial Sequence
  Description of Artificial Sequence: Synthetic oligonucleotide
  Target: ANGPTL4; (-) strand; PAM type: NRG; PAM sequence: CAG
gtgccgccacagtgggagcc

SEQ ID NO: 9293 - DNA, 20 bp, Artificial Sequence
  Description of Artificial Sequence: Synthetic oligonucleotide
  Target: ANGPTL4; (-) strand; PAM type: NRG; PAM sequence: GAG
ctgaagtgccgccacagtgg

SEQ ID NO: 9294 - DNA, 20 bp, Artificial Sequence
  Description of Artificial Sequence: Synthetic oligonucleotide
  Target: ANGPTL4; (-) strand; PAM type: NRG; PAM sequence: GGG
tcctgaagtgccgccacagt

SEQ ID NO: 9295 - DNA, 20 bp, Artificial Sequence
  Description of Artificial Sequence: Synthetic oligonucleotide
  Target: ANGPTL4; (-) strand; PAM type: NRG; PAM sequence: TGG
ctcctgaagtgccgccacag

SEQ ID NO: 9296 - DNA, 20 bp, Artificial Sequence
  Description of Artificial Sequence: Synthetic oligonucleotide
  Target: ANGPTL4; (-) strand; PAM type: NRG; PAM sequence: CAG
gggctcctgaagtgccgcca

SEQ ID NO: 9297 - DNA, 20 bp, Artificial Sequence
  Description of Artificial Sequence: Synthetic oligonucleotide
  Target: ANGPTL4; (-) strand; PAM type: NRG; PAM sequence: AAG
ggtgggctgaagggctcctg

SEQ ID NO: 9298 - DNA, 20 bp, Artificial Sequence
  Description of Artificial Sequence: Synthetic oligonucleotide
  Target: ANGPTL4; (-) strand; PAM type: NRG; PAM sequence: GGG
cagtgcagcggtgggctgaa

SEQ ID NO: 9299 - DNA, 20 bp, Artificial Sequence
  Description of Artificial Sequence: Synthetic oligonucleotide
  Target: ANGPTL4; (-) strand; PAM type: NRG; PAM sequence: AGG
acagtgcagcggtgggctga

SEQ ID NO: 9300 - DNA, 20 bp, Artificial Sequence
  Description of Artificial Sequence: Synthetic oligonucleotide
  Target: ANGPTL4; (-) strand; PAM type: NRG; PAM sequence: AAG
cacagtgcagcggtgggctg

SEQ ID NO: 9301 - DNA, 20 bp, Artificial Sequence
  Description of Artificial Sequence: Synthetic oligonucleotide
  Target: ANGPTL4; (-) strand; PAM type: NRG; PAM sequence: GGG
ggctcccacagtgcagcggt

SEQ ID NO: 9302 - DNA, 20 bp, Artificial Sequence
  Description of Artificial Sequence: Synthetic oligonucleotide
  Target: ANGPTL4; (-) strand; PAM type: NRG; PAM sequence: TGG
gggctcccacagtgcagcgg

SEQ ID NO: 9303 - DNA, 20 bp, Artificial Sequence
  Description of Artificial Sequence: Synthetic oligonucleotide
  Target: ANGPTL4; (-) strand; PAM type: NRG; PAM sequence: CGG
aaggggctcccacagtgcag

SEQ ID NO: 9304 - DNA, 20 bp, Artificial Sequence
  Description of Artificial Sequence: Synthetic oligonucleotide
  Target: ANGPTL4; (-) strand; PAM type: NRG; PAM sequence: CAG
agaaaggggctcccacagtg

SEQ ID NO: 9305 - DNA, 20 bp, Artificial Sequence
  Description of Artificial Sequence: Synthetic oligonucleotide
  Target: ANGPTL4; (-) strand; PAM type: NRG; PAM sequence: CAG
agcccagaaaggggctccca

SEQ ID NO: 9306 - DNA, 20 bp, Artificial Sequence
  Description of Artificial Sequence: Synthetic oligonucleotide
  Target: ANGPTL4; (-) strand; PAM type: NRG; PAM sequence: GGG
gccttggccagcccagaaag

SEQ ID NO: 9307 - DNA, 20 bp, Artificial Sequence
  Description of Artificial Sequence: Synthetic oligonucleotide
  Target: ANGPTL4; (-) strand; PAM type: NRG; PAM sequence: GGG
ggccttggccagcccagaaa

SEQ ID NO: 9308 - DNA, 20 bp, Artificial Sequence
  Description of Artificial Sequence: Synthetic oligonucleotide
  Target: ANGPTL4; (-) strand; PAM type: NRG; PAM sequence: AGG
cggccttggccagcccagaa

SEQ ID NO: 9309 - DNA, 20 bp, Artificial Sequence
  Description of Artificial Sequence: Synthetic oligonucleotide
  Target: ANGPTL4; (-) strand; PAM type: NRG; PAM sequence: AAG
ccggccttggccagcccaga

SEQ ID NO: 9310 - DNA, 20 bp, Artificial Sequence
  Description of Artificial Sequence: Synthetic oligonucleotide
  Target: ANGPTL4; (-) strand; PAM type: NRG; PAM sequence: CAG
agctccggccttggccagcc

SEQ ID NO: 9311 - DNA, 20 bp, Artificial Sequence
  Description of Artificial Sequence: Synthetic oligonucleotide
  Target: ANGPTL4; (-) strand; PAM type: NRG; PAM sequence: CAG
gagccagctccggccttggc

SEQ ID NO: 9312 - DNA, 20 bp, Artificial Sequence
  Description of Artificial Sequence: Synthetic oligonucleotide
  Target: ANGPTL4; (-) strand; PAM type: NRG; PAM sequence: TGG
gagggagccagctccggcct

SEQ ID NO: 9313 - DNA, 20 bp, Artificial Sequence
  Description of Artificial Sequence: Synthetic oligonucleotide
  Target: ANGPTL4; (-) strand; PAM type: NRG; PAM sequence: CGG
caagctgagggagccagctc

SEQ ID NO: 9314 - DNA, 20 bp, Artificial Sequence
  Description of Artificial Sequence: Synthetic oligonucleotide
  Target: ANGPTL4; (-) strand; PAM type: NRG; PAM sequence: CAG
tccctgcaagctgagggagc

SEQ ID NO: 9315 - DNA, 20 bp, Artificial Sequence
  Description of Artificial Sequence: Synthetic oligonucleotide
  Target: ANGPTL4; (-) strand; PAM type: NRG; PAM sequence: GAG
cacttccctgcaagctgagg

SEQ ID NO: 9316 - DNA, 20 bp, Artificial Sequence
  Description of Artificial Sequence: Synthetic oligonucleotide
  Target: ANGPTL4; (-) strand; PAM type: NRG; PAM sequence: GGG
cacacttccctgcaagctga

SEQ ID NO: 9317 - DNA, 20 bp, Artificial Sequence
  Description of Artificial Sequence: Synthetic oligonucleotide
  Target: ANGPTL4; (-) strand; PAM type: NRG; PAM sequence: AGG
ccacacttccctgcaagctg

SEQ ID NO: 9318 - DNA, 20 bp, Artificial Sequence
  Description of Artificial Sequence: Synthetic oligonucleotide
  Target: ANGPTL4; (-) strand; PAM type: NRG; PAM sequence: GAG
tccacacttccctgcaagct

SEQ ID NO: 9319 - DNA, 20 bp, Artificial Sequence
  Description of Artificial Sequence: Synthetic oligonucleotide
  Target: ANGPTL4; (-) strand; PAM type: NRG; PAM sequence: AAG
ctccctccacacttccctgc

SEQ ID NO: 9320 - DNA, 20 bp, Artificial Sequence
  Description of Artificial Sequence: Synthetic oligonucleotide
  Target: ANGPTL4; (-) strand; PAM type: NRG; PAM sequence: CGG
accgcgcgcagccccgattc

SEQ ID NO: 9321 - DNA, 20 bp, Artificial Sequence
  Description of Artificial Sequence: Synthetic oligonucleotide
  Target: ANGPTL4; (-) strand; PAM type: NRG; PAM sequence: CAG
tggcccacaagcaccgcgcg

SEQ ID NO: 9322 - DNA, 20 bp, Artificial Sequence
  Description of Artificial Sequence: Synthetic oligonucleotide
  Target: ANGPTL4; (-) strand; PAM type: NRG; PAM sequence: AAG
cggaactccagctggcccac

SEQ ID NO: 9323 - DNA, 20 bp, Artificial Sequence
  Description of Artificial Sequence: Synthetic oligonucleotide
  Target: ANGPTL4; (-) strand; PAM type: NRG; PAM sequence: TGG
cgcccacccggaactccagc

SEQ ID NO: 9324 - DNA, 20 bp, Artificial Sequence
  Description of Artificial Sequence: Synthetic oligonucleotide
  Target: ANGPTL4; (-) strand; PAM type: NRG; PAM sequence: CAG
cccacgcccacccggaactc

SEQ ID NO: 9325 - DNA, 20 bp, Artificial Sequence
  Description of Artificial Sequence: Synthetic oligonucleotide
  Target: ANGPTL4; (-) strand; PAM type: NRG; PAM sequence: CGG
ccgccaagcccacgcccacc

SEQ ID NO: 9326 - DNA, 20 bp, Artificial Sequence
  Description of Artificial Sequence: Synthetic oligonucleotide
  Target: ANGPTL4; (-) strand; PAM type: NRG; PAM sequence: AAG
ctctgagtgcagggtccgcc

SEQ ID NO: 9327 - DNA, 20 bp, Artificial Sequence
  Description of Artificial Sequence: Synthetic oligonucleotide
  Target: ANGPTL4; (-) strand; PAM type: NRG; PAM sequence: GGG
ggacggctgctctgagtgca

SEQ ID NO: 9328 - DNA, 20 bp, Artificial Sequence
  Description of Artificial Sequence: Synthetic oligonucleotide
  Target: ANGPTL4; (-) strand; PAM type: NRG; PAM sequence: AGG
cggacggctgctctgagtgc

SEQ ID NO: 9329 - DNA, 20 bp, Artificial Sequence
  Description of Artificial Sequence: Synthetic oligonucleotide
  Target: ANGPTL4; (-) strand; PAM type: NRG; PAM sequence: CAG
ccggacggctgctctgagtg

SEQ ID NO: 9330 - DNA, 20 bp, Artificial Sequence
  Description of Artificial Sequence: Synthetic oligonucleotide
  Target: ANGPTL4; (-) strand; PAM type: NRG; PAM sequence: GAG
cagggccggacggctgctct

SEQ ID NO: 9331 - DNA, 20 bp, Artificial Sequence
  Description of Artificial Sequence: Synthetic oligonucleotide
  Target: ANGPTL4; (-) strand; PAM type: NRG; PAM sequence: CGG
ccggggccagcagggccgga

SEQ ID NO: 9332 - DNA, 20 bp, Artificial Sequence
  Description of Artificial Sequence: Synthetic oligonucleotide
  Target: ANGPTL4; (-) strand; PAM type: NRG; PAM sequence: CGG
ttgcccggggccagcagggc

SEQ ID NO: 9333 - DNA, 20 bp, Artificial Sequence
  Description of Artificial Sequence: Synthetic oligonucleotide
  Target: ANGPTL4; (-) strand; PAM type: NRG; PAM sequence: GGG
ctcattgcccggggccagca

SEQ ID NO: 9334 - DNA, 20 bp, Artificial Sequence
  Description of Artificial Sequence: Synthetic oligonucleotide
  Target: ANGPTL4; (-) strand; PAM type: NRG; PAM sequence: AGG
cctcattgcccggggccagc

SEQ ID NO: 9335 - DNA, 20 bp, Artificial Sequence
  Description of Artificial Sequence: Synthetic oligonucleotide
  Target: ANGPTL4; (-) strand; PAM type: NRG; PAM sequence: CAG
ccctcattgcccggggccag

SEQ ID NO: 9336 - DNA, 20 bp, Artificial Sequence
  Description of Artificial Sequence: Synthetic oligonucleotide
  Target: ANGPTL4; (-) strand; PAM type: NRG; PAM sequence: CAG
agcccctcattgcccggggc

SEQ ID NO: 9337 - DNA, 20 bp, Artificial Sequence
  Description of Artificial Sequence: Synthetic oligonucleotide
  Target: ANGPTL4; (-) strand; PAM type: NRG; PAM sequence: GGG
gctaagcccctcattgcccg

SEQ ID NO: 9338 - DNA, 20 bp, Artificial Sequence
  Description of Artificial Sequence: Synthetic oligonucleotide
  Target: ANGPTL4; (-) strand; PAM type: NRG; PAM sequence: GGG
tgctaagcccctcattgccc

SEQ ID NO: 9339 - DNA, 20 bp, Artificial Sequence
  Description of Artificial Sequence: Synthetic oligonucleotide
  Target: ANGPTL4; (-) strand; PAM type: NRG; PAM sequence: CGG
gtgctaagcccctcattgcc

SEQ ID NO: 9340 - DNA, 20 bp, Artificial Sequence
  Description of Artificial Sequence: Synthetic oligonucleotide
  Target: ANGPTL4; (-) strand; PAM type: NRG; PAM sequence: AAG
cgctgtccggcccgggtgct

SEQ ID NO: 9341 - DNA, 20 bp, Artificial Sequence
  Description of Artificial Sequence: Synthetic oligonucleotide
  Target: ANGPTL4; (-) strand; PAM type: NRG; PAM sequence: GGG
ccgcagccgctgtccggccc

SEQ ID NO: 9342 - DNA, 20 bp, Artificial Sequence
  Description of Artificial Sequence: Synthetic oligonucleotide
  Target: ANGPTL4; (-) strand; PAM type: NRG; PAM sequence: CGG
tccgcagccgctgtccggcc

SEQ ID NO: 9343 - DNA, 20 bp, Artificial Sequence
  Description of Artificial Sequence: Synthetic oligonucleotide
  Target: ANGPTL4; (-) strand; PAM type: NRG; PAM sequence: CGG
caccctccgcagccgctgtc

SEQ ID NO: 9344 - DNA, 20 bp, Artificial Sequence
  Description of Artificial Sequence: Synthetic oligonucleotide
  Target: ANGPTL4; (-) strand; PAM type: NRG; PAM sequence: CAG
gggacccagtacaccctccg

SEQ ID NO: 9345 - DNA, 20 bp, Artificial Sequence
  Description of Artificial Sequence: Synthetic oligonucleotide
  Target: ANGPTL4; (-) strand; PAM type: NRG; PAM sequence: CAG
gctggcactgctgggggacc

SEQ ID NO: 9346 - DNA, 20 bp, Artificial Sequence
  Description of Artificial Sequence: Synthetic oligonucleotide
  Target: ANGPTL4; (-) strand; PAM type: NRG; PAM sequence: GGG
cggtgcgctggcactgctgg

SEQ ID NO: 9347 - DNA, 20 bp, Artificial Sequence
  Description of Artificial Sequence: Synthetic oligonucleotide
  Target: ANGPTL4; (-) strand; PAM type: NRG; PAM sequence: GGG
ccggtgcgctggcactgctg

SEQ ID NO: 9348 - DNA, 20 bp, Artificial Sequence
  Description of Artificial Sequence: Synthetic oligonucleotide
  Target: ANGPTL4; (-) strand; PAM type: NRG; PAM sequence: GGG
gccggtgcgctggcactgct

SEQ ID NO: 9349 - DNA, 20 bp, Artificial Sequence
  Description of Artificial Sequence: Synthetic oligonucleotide
  Target: ANGPTL4; (-) strand; PAM type: NRG; PAM sequence: TGG
cgccggtgcgctggcactgc

SEQ ID NO: 9350 - DNA, 20 bp, Artificial Sequence
  Description of Artificial Sequence: Synthetic oligonucleotide
  Target: ANGPTL4; (-) strand; PAM type: NRG; PAM sequence: TGG
caagcgcagcgccggtgcgc

SEQ ID NO: 9351 - DNA, 20 bp, Artificial Sequence
  Description of Artificial Sequence: Synthetic oligonucleotide
  Target: ANGPTL4; (-) strand; PAM type: NRG; PAM sequence: CGG
tgagaaatcaagcgcagcgc

SEQ ID NO: 9352 - DNA, 20 bp, Artificial Sequence
  Description of Artificial Sequence: Synthetic oligonucleotide
  Target: ANGPTL4; (-) strand; PAM type: NRG; PAM sequence: CAG
gcctggtgagaaatcaagcg

SEQ ID NO: 9353 - DNA, 20 bp, Artificial Sequence
  Description of Artificial Sequence: Synthetic oligonucleotide
  Target: ANGPTL4; (-) strand; PAM type: NRG; PAM sequence: AAG
ctaaggcctggtgagaaatc

SEQ ID NO: 9354 - DNA, 20 bp, Artificial Sequence
  Description of Artificial Sequence: Synthetic oligonucleotide
  Target: ANGPTL4; (-) strand; PAM type: NRG; PAM sequence: GAG
gaaggcagctaaggcctggt

SEQ ID NO: 9355 - DNA, 20 bp, Artificial Sequence
  Description of Artificial Sequence: Synthetic oligonucleotide
  Target: ANGPTL4; (-) strand; PAM type: NRG; PAM sequence: TGG
gcgggaaggcagctaaggcc

SEQ ID NO: 9356 - DNA, 20 bp, Artificial Sequence
  Description of Artificial Sequence: Synthetic oligonucleotide
  Target: ANGPTL4; (-) strand; PAM type: NRG; PAM sequence: AGG
gccccgcgggaaggcagcta

SEQ ID NO: 9357 - DNA, 20 bp, Artificial Sequence
  Description of Artificial Sequence: Synthetic oligonucleotide
  Target: ANGPTL4; (-) strand; PAM type: NRG; PAM sequence: AAG
tgccccgcgggaaggcagct

SEQ ID NO: 9358 - DNA, 20 bp, Artificial Sequence
  Description of Artificial Sequence: Synthetic oligonucleotide
  Target: ANGPTL4; (-) strand; PAM type: NRG; PAM sequence: CAG
atccctgccccgcgggaagg

SEQ ID NO: 9359 - DNA, 20 bp, Artificial Sequence
  Description of Artificial Sequence: Synthetic oligonucleotide
  Target: ANGPTL4; (-) strand; PAM type: NRG; PAM sequence: AGG
ccgatccctgccccgcggga

SEQ ID NO: 9360 - DNA, 20 bp, Artificial Sequence
  Description of Artificial Sequence: Synthetic oligonucleotide
  Target: ANGPTL4; (-) strand; PAM type: NRG; PAM sequence: AAG
cccgatccctgccccgcggg

SEQ ID NO: 9361 - DNA, 20 bp, Artificial Sequence
  Description of Artificial Sequence: Synthetic oligonucleotide
  Target: ANGPTL4; (-) strand; PAM type: NRG; PAM sequence: GGG
ggtcccgatccctgccccgc

SEQ ID NO: 9362 - DNA, 20 bp, Artificial Sequence
  Description of Artificial Sequence: Synthetic oligonucleotide
  Target: ANGPTL4; (-) strand; PAM type: NRG; PAM sequence: CGG
aggtcccgatccctgccccg

SEQ ID NO: 9363 - DNA, 20 bp, Artificial Sequence
  Description of Artificial Sequence: Synthetic oligonucleotide
  Target: ANGPTL4; (-) strand; PAM type: NRG; PAM sequence: AGG
gctcaggcatggcgggctgc

SEQ ID NO: 9364 - DNA, 20 bp, Artificial Sequence
  Description of Artificial Sequence: Synthetic oligonucleotide
  Target: ANGPTL4; (-) strand; PAM type: NRG; PAM sequence: CAG
ggctcaggcatggcgggctg

SEQ ID NO: 9365 - DNA, 20 bp, Artificial Sequence
  Description of Artificial Sequence: Synthetic oligonucleotide
  Target: ANGPTL4; (-) strand; PAM type: NRG; PAM sequence: GGG
gtgggaggctcaggcatggc

SEQ ID NO: 9366 - DNA, 20 bp, Artificial Sequence
  Description of Artificial Sequence: Synthetic oligonucleotide
  Target: ANGPTL4; (-) strand; PAM type: NRG; PAM sequence: CGG
ggtgggaggctcaggcatgg

SEQ ID NO: 9367 - DNA, 20 bp, Artificial Sequence
  Description of Artificial Sequence: Synthetic oligonucleotide
  Target: ANGPTL4; (-) strand; PAM type: NRG; PAM sequence: TGG
gggggtgggaggctcaggca

SEQ ID NO: 9368 - DNA, 20 bp, Artificial Sequence
  Description of Artificial Sequence: Synthetic oligonucleotide
  Target: ANGPTL4; (-) strand; PAM type: NRG; PAM sequence: AGG
atggagggggtgggaggctc

SEQ ID NO: 9369 - DNA, 20 bp, Artificial Sequence
  Description of Artificial Sequence: Synthetic oligonucleotide
  Target: ANGPTL4; (-) strand; PAM type: NRG; PAM sequence: CAG
catggagggggtgggaggct

SEQ ID NO: 9370 - DNA, 20 bp, Artificial Sequence
  Description of Artificial Sequence: Synthetic oligonucleotide
  Target: ANGPTL4; (-) strand; PAM type: NRG; PAM sequence: AGG
gagcccatggagggggtggg

SEQ ID NO: 9371 - DNA, 20 bp, Artificial Sequence
  Description of Artificial Sequence: Synthetic oligonucleotide
  Target: ANGPTL4; (-) strand; PAM type: NRG; PAM sequence: GAG
ggagcccatggagggggtgg

SEQ ID NO: 9372 - DNA, 20 bp, Artificial Sequence
  Description of Artificial Sequence: Synthetic oligonucleotide
  Target: ANGPTL4; (-) strand; PAM type: NRG; PAM sequence: GGG
caggagcccatggagggggt

SEQ ID NO: 9373 - DNA, 20 bp, Artificial Sequence
  Description of Artificial Sequence: Synthetic oligonucleotide
  Target: ANGPTL4; (-) strand; PAM type: NRG; PAM sequence: TGG
acaggagcccatggaggggg

SEQ ID NO: 9374 - DNA, 20 bp, Artificial Sequence
  Description of Artificial Sequence: Synthetic oligonucleotide
  Target: ANGPTL4; (-) strand; PAM type: NRG; PAM sequence: GGG
cgcacaggagcccatggagg

SEQ ID NO: 9375 - DNA, 20 bp, Artificial Sequence
  Description of Artificial Sequence: Synthetic oligonucleotide
  Target: ANGPTL4; (-) strand; PAM type: NRG; PAM sequence: GGG
ccgcacaggagcccatggag

SEQ ID NO: 9376 - DNA, 20 bp, Artificial Sequence
  Description of Artificial Sequence: Synthetic oligonucleotide
  Target: ANGPTL4; (-) strand; PAM type: NRG; PAM sequence: GGG
gccgcacaggagcccatgga

SEQ ID NO: 9377 - DNA, 20 bp, Artificial Sequence
  Description of Artificial Sequence: Synthetic oligonucleotide
  Target: ANGPTL4; (-) strand; PAM type: NRG; PAM sequence: AGG
ggccgcacaggagcccatgg

SEQ ID NO: 9378 - DNA, 20 bp, Artificial Sequence
  Description of Artificial Sequence: Synthetic oligonucleotide
  Target: ANGPTL4; (-) strand; PAM type: NRG; PAM sequence: GAG
gggccgcacaggagcccatg

SEQ ID NO: 9379 - DNA, 20 bp, Artificial Sequence
  Description of Artificial Sequence: Synthetic oligonucleotide
  Target: ANGPTL4; (-) strand; PAM type: NRG; PAM sequence: TGG
gcgggccgcacaggagccca

SEQ ID NO: 9380 - DNA, 20 bp, Artificial Sequence
  Description of Artificial Sequence: Synthetic oligonucleotide
  Target: ANGPTL4; (-) strand; PAM type: NRG; PAM sequence: GAG
gggaggcgcgggccgcacag

SEQ ID NO: 9381 - DNA, 20 bp, Artificial Sequence
  Description of Artificial Sequence: Synthetic oligonucleotide
  Target: ANGPTL4; (-) strand; PAM type: NRG; PAM sequence: AGG
cagggaggcgcgggccgcac

SEQ ID NO: 9382 - DNA, 20 bp, Artificial Sequence
  Description of Artificial Sequence: Synthetic oligonucleotide
  Target: ANGPTL4; (-) strand; PAM type: NRG; PAM sequence: CAG
tcagggaggcgcgggccgca

SEQ ID NO: 9383 - DNA, 20 bp, Artificial Sequence
  Description of Artificial Sequence: Synthetic oligonucleotide
  Target: ANGPTL4; (-) strand; PAM type: NRG; PAM sequence: GGG
agtgctcgtcagggaggcgc

SEQ ID NO: 9384 - DNA, 20 bp, Artificial Sequence
  Description of Artificial Sequence: Synthetic oligonucleotide
  Target: ANGPTL4; (-) strand; PAM type: NRG; PAM sequence: CGG
cagtgctcgtcagggaggcg

SEQ ID NO: 9385 - DNA, 20 bp, Artificial Sequence
  Description of Artificial Sequence: Synthetic oligonucleotide
  Target: ANGPTL4; (-) strand; PAM type: NRG; PAM sequence: AGG
tggggcagtgctcgtcaggg

SEQ ID NO: 9386 - DNA, 20 bp, Artificial Sequence
  Description of Artificial Sequence: Synthetic oligonucleotide
  Target: ANGPTL4; (-) strand; PAM type: NRG; PAM sequence: GAG
atggggcagtgctcgtcagg

SEQ ID NO: 9387 - DNA, 20 bp, Artificial Sequence
  Description of Artificial Sequence: Synthetic oligonucleotide
  Target: ANGPTL4; (-) strand; PAM type: NRG; PAM sequence: GGG
gcatggggcagtgctcgtca

SEQ ID NO: 9388 - DNA, 20 bp, Artificial Sequence
  Description of Artificial Sequence: Synthetic oligonucleotide
  Target: ANGPTL4; (-) strand; PAM type: NRG; PAM sequence: AGG
agcatggggcagtgctcgtc

SEQ ID NO: 9389 - DNA, 20 bp, Artificial Sequence
  Description of Artificial Sequence: Synthetic oligonucleotide
  Target: ANGPTL4; (-) strand; PAM type: NRG; PAM sequence: CAG
gagcatggggcagtgctcgt

SEQ ID NO: 9390 - DNA, 20 bp, Artificial Sequence
  Description of Artificial Sequence: Synthetic oligonucleotide
  Target: ANGPTL4; (-) strand; PAM type: NRG; PAM sequence: CAG
gggcaccatggagcatgggg

SEQ ID NO: 9391 - DNA, 20 bp, Artificial Sequence
  Description of Artificial Sequence: Synthetic oligonucleotide
  Target: ANGPTL4; (-) strand; PAM type: NRG; PAM sequence: GGG
actgggcaccatggagcatg

SEQ ID NO: 9392 - DNA, 20 bp, Artificial Sequence
  Description of Artificial Sequence: Synthetic oligonucleotide
  Target: ANGPTL4; (-) strand; PAM type: NRG; PAM sequence: GGG
gactgggcaccatggagcat

SEQ ID NO: 9393 - DNA, 20 bp, Artificial Sequence
  Description of Artificial Sequence: Synthetic oligonucleotide
  Target: ANGPTL4; (-) strand; PAM type: NRG; PAM sequence: TGG
ggactgggcaccatggagca

SEQ ID NO: 9394 - DNA, 20 bp, Artificial Sequence
  Description of Artificial Sequence: Synthetic oligonucleotide
  Target: ANGPTL4; (-) strand; PAM type: NRG; PAM sequence: GAG
ggatgggactgggcaccatg

SEQ ID NO: 9395 - DNA, 20 bp, Artificial Sequence
  Description of Artificial Sequence: Synthetic oligonucleotide
  Target: ANGPTL4; (-) strand; PAM type: NRG; PAM sequence: TGG
gtggatgggactgggcacca

SEQ ID NO: 9396 - DNA, 20 bp, Artificial Sequence
  Description of Artificial Sequence: Synthetic oligonucleotide
  Target: ANGPTL4; (-) strand; PAM type: NRG; PAM sequence: GGG
cttgggtggtggatgggact

SEQ ID NO: 9397 - DNA, 20 bp, Artificial Sequence
  Description of Artificial Sequence: Synthetic oligonucleotide
  Target: ANGPTL4; (-) strand; PAM type: NRG; PAM sequence: TGG
ccttgggtggtggatgggac

SEQ ID NO: 9398 - DNA, 20 bp, Artificial Sequence
  Description of Artificial Sequence: Synthetic oligonucleotide
  Target: ANGPTL4; (-) strand; PAM type: NRG; PAM sequence: GGG
tcagcccttgggtggtggat

SEQ ID NO: 9399 - DNA, 20 bp, Artificial Sequence
  Description of Artificial Sequence: Synthetic oligonucleotide
  Target: ANGPTL4; (-) strand; PAM type: NRG; PAM sequence: TGG
ctcagcccttgggtggtgga

SEQ ID NO: 9400 - DNA, 20 bp, Artificial Sequence
  Description of Artificial Sequence: Synthetic oligonucleotide
  Target: ANGPTL4; (-) strand; PAM type: NRG; PAM sequence: TGG
actcctcagcccttgggtgg

SEQ ID NO: 9401 - DNA, 20 bp, Artificial Sequence
  Description of Artificial Sequence: Synthetic oligonucleotide
  Target: ANGPTL4; (-) strand; PAM type: NRG; PAM sequence: TGG
tgcactcctcagcccttggg

SEQ ID NO: 9402 - DNA, 20 bp, Artificial Sequence
  Description of Artificial Sequence: Synthetic oligonucleotide
  Target: ANGPTL4; (-) strand; PAM type: NRG; PAM sequence: GGG
gcctgcactcctcagccctt

SEQ ID NO: 9403 - DNA, 20 bp, Artificial Sequence
  Description of Artificial Sequence: Synthetic oligonucleotide
  Target: ANGPTL4; (-) strand; PAM type: NRG; PAM sequence: TGG
cgcctgcactcctcagccct

SEQ ID NO: 9404 - DNA, 20 bp, Artificial Sequence
  Description of Artificial Sequence: Synthetic oligonucleotide
  Target: ANGPTL4; (-) strand; PAM type: NRG; PAM sequence: CAG
cgccgtgcgcctgcactcct

SEQ ID NO: 9405 - DNA, 20 bp, Artificial Sequence
  Description of Artificial Sequence: Synthetic oligonucleotide
  Target: ANGPTL4; (-) strand; PAM type: NRG; PAM sequence: CAG
ctgcaggtggagctgcctgc

SEQ ID NO: 9406 - DNA, 20 bp, Artificial Sequence
  Description of Artificial Sequence: Synthetic oligonucleotide
  Target: ANGPTL4; (-) strand; PAM type: NRG; PAM sequence: GAG
ctgcaccggggctgcaggtg

SEQ ID NO: 9407 - DNA, 20 bp, Artificial Sequence
  Description of Artificial Sequence: Synthetic oligonucleotide
  Target: ANGPTL4; (-) strand; PAM type: NRG; PAM sequence: TGG
tcctgcaccggggctgcagg

SEQ ID NO: 9408 - DNA, 20 bp, Artificial Sequence
  Description of Artificial Sequence: Synthetic oligonucleotide
  Target: ANGPTL4; (-) strand; PAM type: NRG; PAM sequence: AGG
ggatcctgcaccggggctgc

SEQ ID NO: 9409 - DNA, 20 bp, Artificial Sequence
  Description of Artificial Sequence: Synthetic oligonucleotide
  Target: ANGPTL4; (-) strand; PAM type: NRG; PAM sequence: CAG
tggatcctgcaccggggctg

SEQ ID NO: 9410 - DNA, 20 bp, Artificial Sequence
  Description of Artificial Sequence: Synthetic oligonucleotide
  Target: ANGPTL4; (-) strand; PAM type: NRG; PAM sequence: GGG
acccagtggatcctgcaccg

SEQ ID NO: 9411 - DNA, 20 bp, Artificial Sequence
  Description of Artificial Sequence: Synthetic oligonucleotide
  Target: ANGPTL4; (-) strand; PAM type: NRG; PAM sequence: GGG
cacccagtggatcctgcacc

SEQ ID NO: 9412 - DNA, 20 bp, Artificial Sequence
  Description of Artificial Sequence: Synthetic oligonucleotide
  Target: ANGPTL4; (-) strand; PAM type: NRG; PAM sequence: CGG
tcacccagtggatcctgcac

SEQ ID NO: 9413 - DNA, 20 bp, Artificial Sequence
  Description of Artificial Sequence: Synthetic oligonucleotide
  Target: ANGPTL4; (-) strand; PAM type: NRG; PAM sequence: TGG
gcccagctagcttcacccag

SEQ ID NO: 9414 - DNA, 20 bp, Artificial Sequence
  Description of Artificial Sequence: Synthetic oligonucleotide
  Target: ANGPTL4; (-) strand; PAM type: NRG; PAM sequence: CAG
ggagcccagctagcttcacc

SEQ ID NO: 9415 - DNA, 20 bp, Artificial Sequence
  Description of Artificial Sequence: Synthetic oligonucleotide
  Target: ANGPTL4; (-) strand; PAM type: NRG; PAM sequence: TAG
accagactcaggagcccagc

SEQ ID NO: 9416 - DNA, 20 bp, Artificial Sequence
  Description of Artificial Sequence: Synthetic oligonucleotide
  Target: ANGPTL4; (-) strand; PAM type: NRG; PAM sequence: CAG
ccccaccagactcaggagcc

SEQ ID NO: 9417 - DNA, 20 bp, Artificial Sequence
  Description of Artificial Sequence: Synthetic oligonucleotide
  Target: ANGPTL4; (-) strand; PAM type: NRG; PAM sequence: GAG
cacgtccccaccagactcag

SEQ ID NO: 9418 - DNA, 20 bp, Artificial Sequence
  Description of Artificial Sequence: Synthetic oligonucleotide
  Target: ANGPTL4; (-) strand; PAM type: NRG; PAM sequence: AGG
tccacgtccccaccagactc

SEQ ID NO: 9419 - DNA, 20 bp, Artificial Sequence
  Description of Artificial Sequence: Synthetic oligonucleotide
  Target: ANGPTL4; (-) strand; PAM type: NRG; PAM sequence: CAG
ctccacgtccccaccagact

SEQ ID NO: 9420 - DNA, 20 bp, Artificial Sequence
  Description of Artificial Sequence: Synthetic oligonucleotide
  Target: ANGPTL4; (-) strand; PAM type: NRG; PAM sequence: CAG
aaggttctccacgtccccac

SEQ ID NO: 9421 - DNA, 20 bp, Artificial Sequence
  Description of Artificial Sequence: Synthetic oligonucleotide
  Target: ANGPTL4; (-) strand; PAM type: NRG; PAM sequence: AGG
acaatccctgagctagacaa

SEQ ID NO: 9422 - DNA, 20 bp, Artificial Sequence
  Description of Artificial Sequence: Synthetic oligonucleotide
  Target: ANGPTL4; (-) strand; PAM type: NRG; PAM sequence: AAG
tacaatccctgagctagaca

SEQ ID NO: 9423 - DNA, 20 bp, Artificial Sequence
  Description of Artificial Sequence: Synthetic oligonucleotide
  Target: ANGPTL4; (-) strand; PAM type: NRG; PAM sequence: TAG
tgtatttacaatccctgagc

SEQ ID NO: 9424 - DNA, 20 bp, Artificial Sequence
  Description of Artificial Sequence: Synthetic oligonucleotide
  Target: ANGPTL4; (-) strand; PAM type: NRG; PAM sequence: GAG
ttggtgtatttacaatccct

SEQ ID NO: 9425 - DNA, 20 bp, Artificial Sequence
  Description of Artificial Sequence: Synthetic oligonucleotide
  Target: ANGPTL4; (-) strand; PAM type: NRG; PAM sequence: TGG
gctagacatagggtgatgat

SEQ ID NO: 9426 - DNA, 20 bp, Artificial Sequence
  Description of Artificial Sequence: Synthetic oligonucleotide
  Target: ANGPTL4; (-) strand; PAM type: NRG; PAM sequence: GGG
caaaccctgagctagacata

SEQ ID NO: 9427 - DNA, 20 bp, Artificial Sequence
  Description of Artificial Sequence: Synthetic oligonucleotide
  Target: ANGPTL4; (-) strand; PAM type: NRG; PAM sequence: AGG
acaaaccctgagctagacat

SEQ ID NO: 9428 - DNA, 20 bp, Artificial Sequence
  Description of Artificial Sequence: Synthetic oligonucleotide
  Target: ANGPTL4; (-) strand; PAM type: NRG; PAM sequence: TAG
cacaaaccctgagctagaca

SEQ ID NO: 9429 - DNA, 20 bp, Artificial Sequence
  Description of Artificial Sequence: Synthetic oligonucleotide
  Target: ANGPTL4; (-) strand; PAM type: NRG; PAM sequence: TAG
tgcattcacaaaccctgagc

SEQ ID NO: 9430 - DNA, 20 bp, Artificial Sequence
  Description of Artificial Sequence: Synthetic oligonucleotide
  Target: ANGPTL4; (-) strand; PAM type: NRG; PAM sequence: GAG
ttggtgcattcacaaaccct

SEQ ID NO: 9431 - DNA, 20 bp, Artificial Sequence
  Description of Artificial Sequence: Synthetic oligonucleotide
  Target: ANGPTL4; (-) strand; PAM type: NRG; PAM sequence: TGG
gctagatacagagtgttcat

SEQ ID NO: 9432 - DNA, 20 bp, Artificial Sequence
  Description of Artificial Sequence: Synthetic oligonucleotide
  Target: ANGPTL4; (-) strand; PAM type: NRG; PAM sequence: GAG
caccagagtagctagataca

SEQ ID NO: 9433 - DNA, 20 bp, Artificial Sequence
  Description of Artificial Sequence: Synthetic oligonucleotide
  Target: ANGPTL4; (-) strand; PAM type: NRG; PAM sequence: CAG
cccaccagagtagctagata

SEQ ID NO: 9434 - DNA, 20 bp, Artificial Sequence
  Description of Artificial Sequence: Synthetic oligonucleotide
  Target: ANGPTL4; (-) strand; PAM type: NRG; PAM sequence: TAG
caaggccccaccagagtagc

SEQ ID NO: 9435 - DNA, 20 bp, Artificial Sequence
  Description of Artificial Sequence: Synthetic oligonucleotide
  Target: ANGPTL4; (-) strand; PAM type: NRG; PAM sequence: TAG
tctccaaggccccaccagag

SEQ ID NO: 9436 - DNA, 20 bp, Artificial Sequence
  Description of Artificial Sequence: Synthetic oligonucleotide
  Target: ANGPTL4; (-) strand; PAM type: NRG; PAM sequence: GAG
ggttctccaaggccccacca

SEQ ID NO: 9437 - DNA, 20 bp, Artificial Sequence
  Description of Artificial Sequence: Synthetic oligonucleotide
  Target: ANGPTL4; (-) strand; PAM type: NRG; PAM sequence: CAG
aaggttctccaaggccccac

SEQ ID NO: 9438 - DNA, 20 bp, Artificial Sequence
  Description of Artificial Sequence: Synthetic oligonucleotide
  Target: ANGPTL4; (-) strand; PAM type: NRG; PAM sequence: AGG
ctagacataaaggttctcca

SEQ ID NO: 9439 - DNA, 20 bp, Artificial Sequence
  Description of Artificial Sequence: Synthetic oligonucleotide
  Target: ANGPTL4; (-) strand; PAM type: NRG; PAM sequence: AAG
gctagacataaaggttctcc

SEQ ID NO: 9440 - DNA, 20 bp, Artificial Sequence
  Description of Artificial Sequence: Synthetic oligonucleotide
  Target: ANGPTL4; (-) strand; PAM type: NRG; PAM sequence: AGG
aatccctgagctagacataa

SEQ ID NO: 9441 - DNA, 20 bp, Artificial Sequence
  Description of Artificial Sequence: Synthetic oligonucleotide
  Target: ANGPTL4; (-) strand; PAM type: NRG; PAM sequence: AAG
caatccctgagctagacata

SEQ ID NO: 9442 - DNA, 20 bp, Artificial Sequence
  Description of Artificial Sequence: Synthetic oligonucleotide
  Target: ANGPTL4; (-) strand; PAM type: NRG; PAM sequence: TAG
tgtatttacaatccctgagc

SEQ ID NO: 9443 - DNA, 20 bp, Artificial Sequence
  Description of Artificial Sequence: Synthetic oligonucleotide
  Target: ANGPTL4; (-) strand; PAM type: NRG; PAM sequence: GAG
ttggtgtatttacaatccct

SEQ ID NO: 9444 - DNA, 20 bp, Artificial Sequence
  Description of Artificial Sequence: Synthetic oligonucleotide
  Target: ANGPTL4; (-) strand; PAM type: NRG; PAM sequence: TGG
gctagatacagagtgccgat

SEQ ID NO: 9445 - DNA, 20 bp, Artificial Sequence
  Description of Artificial Sequence: Synthetic oligonucleotide
  Target: ANGPTL4; (-) strand; PAM type: NRG; PAM sequence: GAG
caaaccttgagctagataca

SEQ ID NO: 9446 - DNA, 20 bp, Artificial Sequence
  Description of Artificial Sequence: Synthetic oligonucleotide
  Target: ANGPTL4; (-) strand; PAM type: NRG; PAM sequence: CAG
tacaaaccttgagctagata

SEQ ID NO: 9447 - DNA, 20 bp, Artificial Sequence
  Description of Artificial Sequence: Synthetic oligonucleotide
  Target: ANGPTL4; (-) strand; PAM type: NRG; PAM sequence: TAG
tgtgtttacaaaccttgagc

SEQ ID NO: 9448 - DNA, 20 bp, Artificial Sequence
  Description of Artificial Sequence: Synthetic oligonucleotide
  Target: ANGPTL4; (-) strand; PAM type: NRG; PAM sequence: GAG
ttggtgtgtttacaaacctt

SEQ ID NO: 9449 - DNA, 20 bp, Artificial Sequence
  Description of Artificial Sequence: Synthetic oligonucleotide
  Target: ANGPTL4; (-) strand; PAM type: NRG; PAM sequence: TGG
gctagacacagggtgctgat

SEQ ID NO: 9450 - DNA, 20 bp, Artificial Sequence
  Description of Artificial Sequence: Synthetic oligonucleotide
  Target: ANGPTL4; (-) strand; PAM type: NRG; PAM sequence: GGG
caaaccctgagctagacaca

SEQ ID NO: 9451 - DNA, 20 bp, Artificial Sequence
  Description of Artificial Sequence: Synthetic oligonucleotide
  Target: ANGPTL4; (-) strand; PAM type: NRG; PAM sequence: AGG
acaaaccctgagctagacac

SEQ ID NO: 9452 - DNA, 20 bp, Artificial Sequence
  Description of Artificial Sequence: Synthetic oligonucleotide
  Target: ANGPTL4; (-) strand; PAM type: NRG; PAM sequence: CAG
cacaaaccctgagctagaca

SEQ ID NO: 9453 - DNA, 20 bp, Artificial Sequence
  Description of Artificial Sequence: Synthetic oligonucleotide
  Target: ANGPTL4; (-) strand; PAM type: NRG; PAM sequence: TAG
tgcattcacaaaccctgagc

SEQ ID NO: 9454 - DNA, 20 bp, Artificial Sequence
  Description of Artificial Sequence: Synthetic oligonucleotide
  Target: ANGPTL4; (-) strand; PAM type: NRG; PAM sequence: GAG
ttggtgcattcacaaaccct

SEQ ID NO: 9455 - DNA, 20 bp, Artificial Sequence
  Description of Artificial Sequence: Synthetic oligonucleotide
  Target: ANGPTL4; (-) strand; PAM type: NRG; PAM sequence: TGG
gctagatacagagtgtcgat

SEQ ID NO: 9456 - DNA, 20 bp, Artificial Sequence
  Description of Artificial Sequence: Synthetic oligonucleotide
  Target: ANGPTL4; (-) strand; PAM type: NRG; PAM sequence: GAG
caccacagtagctagataca

SEQ ID NO: 9457 - DNA, 20 bp, Artificial Sequence
  Description of Artificial Sequence: Synthetic oligonucleotide
  Target: ANGPTL4; (-) strand; PAM type: NRG; PAM sequence: CAG
cccaccacagtagctagata

SEQ ID NO: 9458 - DNA, 20 bp, Artificial Sequence
  Description of Artificial Sequence: Synthetic oligonucleotide
  Target: ANGPTL4; (-) strand; PAM type: NRG; PAM sequence: TAG
caaggccccaccacagtagc

SEQ ID NO: 9459 - DNA, 20 bp, Artificial Sequence
  Description of Artificial Sequence: Synthetic oligonucleotide
  Target: ANGPTL4; (-) strand; PAM type: NRG; PAM sequence: TAG
tctccaaggccccaccacag

SEQ ID NO: 9460 - DNA, 20 bp, Artificial Sequence
  Description of Artificial Sequence: Synthetic oligonucleotide
  Target: ANGPTL4; (-) strand; PAM type: NRG; PAM sequence: CAG
ggttctccaaggccccacca

SEQ ID NO: 9461 - DNA, 20 bp, Artificial Sequence
  Description of Artificial Sequence: Synthetic oligonucleotide
  Target: ANGPTL4; (-) strand; PAM type: NRG; PAM sequence: AGG
gtcaacacaaaggttctcca

SEQ ID NO: 9462 - DNA, 20 bp, Artificial Sequence
  Description of Artificial Sequence: Synthetic oligonucleotide
  Target: ANGPTL4; (-) strand; PAM type: NRG; PAM sequence: AAG
tgtcaacacaaaggttctcc

SEQ ID NO: 9463 - DNA, 20 bp, Artificial Sequence
  Description of Artificial Sequence: Synthetic oligonucleotide
  Target: ANGPTL4; (-) strand; PAM type: NRG; PAM sequence: AGG
gatacagagtgtcaacacaa

SEQ ID NO: 9464 - DNA, 20 bp, Artificial Sequence
  Description of Artificial Sequence: Synthetic oligonucleotide
  Target: ANGPTL4; (-) strand; PAM type: NRG; PAM sequence: AAG
agatacagagtgtcaacaca

SEQ ID NO: 9465 - DNA, 20 bp, Artificial Sequence
  Description of Artificial Sequence: Synthetic oligonucleotide
  Target: ANGPTL4; (-) strand; PAM type: NRG; PAM sequence: GAG
caccagattaactagataca

SEQ ID NO: 9466 - DNA, 20 bp, Artificial Sequence
  Description of Artificial Sequence: Synthetic oligonucleotide
  Target: ANGPTL4; (-) strand; PAM type: NRG; PAM sequence: CAG
cccaccagattaactagata

SEQ ID NO: 9467 - DNA, 20 bp, Artificial Sequence
  Description of Artificial Sequence: Synthetic oligonucleotide
  Target: ANGPTL4; (-) strand; PAM type: NRG; PAM sequence: TAG
cacatccccaccagattaac

SEQ ID NO: 9468 - DNA, 20 bp, Artificial Sequence
  Description of Artificial Sequence: Synthetic oligonucleotide
  Target: ANGPTL4; (-) strand; PAM type: NRG; PAM sequence: CAG
aaggttctccacatccccac

SEQ ID NO: 9469 - DNA, 20 bp, Artificial Sequence
  Description of Artificial Sequence: Synthetic oligonucleotide
  Target: ANGPTL4; (-) strand; PAM type: NRG; PAM sequence: AGG
aattcctgagctagacacaa

SEQ ID NO: 9470 - DNA, 20 bp, Artificial Sequence
  Description of Artificial Sequence: Synthetic oligonucleotide
  Target: ANGPTL4; (-) strand; PAM type: NRG; PAM sequence: AAG
caattcctgagctagacaca

SEQ ID NO: 9471 - DNA, 20 bp, Artificial Sequence
  Description of Artificial Sequence: Synthetic oligonucleotide
  Target: ANGPTL4; (-) strand; PAM type: NRG; PAM sequence: TAG
tgcgtttacaattcctgagc

SEQ ID NO: 9472 - DNA, 20 bp, Artificial Sequence
  Description of Artificial Sequence: Synthetic oligonucleotide
  Target: ANGPTL4; (-) strand; PAM type: NRG; PAM sequence: GAG
ttggtgcgtttacaattcct

SEQ ID NO: 9473 - DNA, 20 bp, Artificial Sequence
  Description of Artificial Sequence: Synthetic oligonucleotide
  Target: ANGPTL4; (-) strand; PAM type: NRG; PAM sequence: TGG
tgttttgacagggcgctgat

SEQ ID NO: 9474 - DNA, 20 bp, Artificial Sequence
  Description of Artificial Sequence: Synthetic oligonucleotide
  Target: ANGPTL4; (-) strand; PAM type: NRG; PAM sequence: GGG
cccactggtctgttttgaca

SEQ ID NO: 9475 - DNA, 20 bp, Artificial Sequence
  Description of Artificial Sequence: Synthetic oligonucleotide
  Target: ANGPTL4; (-) strand; PAM type: NRG; PAM sequence: AGG
gcccactggtctgttttgac

SEQ ID NO: 9476 - DNA, 20 bp, Artificial Sequence
  Description of Artificial Sequence: Synthetic oligonucleotide
  Target: ANGPTL4; (-) strand; PAM type: NRG; PAM sequence: CAG
agcccactggtctgttttga

SEQ ID NO: 9477 - DNA, 20 bp, Artificial Sequence
  Description of Artificial Sequence: Synthetic oligonucleotide
  Target: ANGPTL4; (-) strand; PAM type: NRG; PAM sequence: TGG
tgctgattggtagagcccac

SEQ ID NO: 9478 - DNA, 20 bp, Artificial Sequence
  Description of Artificial Sequence: Synthetic oligonucleotide
  Target: ANGPTL4; (-) strand; PAM type: NRG; PAM sequence: GAG
ccacatcctgctgattggta

SEQ ID NO: 9479 - DNA, 20 bp, Artificial Sequence
  Description of Artificial Sequence: Synthetic oligonucleotide
  Target: ANGPTL4; (-) strand; PAM type: NRG; PAM sequence: TAG
acccacatcctgctgattgg

SEQ ID NO: 9480 - DNA, 20 bp, Artificial Sequence
  Description of Artificial Sequence: Synthetic oligonucleotide
  Target: ANGPTL4; (-) strand; PAM type: NRG; PAM sequence: TGG
cccacccacatcctgctgat

SEQ ID NO: 9481 - DNA, 20 bp, Artificial Sequence
  Description of Artificial Sequence: Synthetic oligonucleotide
  Target: ANGPTL4; (-) strand; PAM type: NRG; PAM sequence: TGG
cctgcttttattctcttatc

SEQ ID NO: 9482 - DNA, 20 bp, Artificial Sequence
  Description of Artificial Sequence: Synthetic oligonucleotide
  Target: ANGPTL4; (-) strand; PAM type: NRG; PAM sequence: CAG
gttgccactgctggctcggg

SEQ ID NO: 9483 - DNA, 20 bp, Artificial Sequence
  Description of Artificial Sequence: Synthetic oligonucleotide
  Target: ANGPTL4; (-) strand; PAM type: NRG; PAM sequence: GGG
tgggttgccactgctggctc

SEQ ID NO: 9484 - DNA, 20 bp, Artificial Sequence
  Description of Artificial Sequence: Synthetic oligonucleotide
  Target: ANGPTL4; (-) strand; PAM type: NRG; PAM sequence: CGG
gtgggttgccactgctggct

SEQ ID NO: 9485 - DNA, 20 bp, Artificial Sequence
  Description of Artificial Sequence: Synthetic oligonucleotide
  Target: ANGPTL4; (-) strand; PAM type: NRG; PAM sequence: TGG
cccaagtgggttgccactgc

SEQ ID NO: 9486 - DNA, 20 bp, Artificial Sequence
  Description of Artificial Sequence: Synthetic oligonucleotide
  Target: ANGPTL4; (-) strand; PAM type: NRG; PAM sequence: GGG
gtgtggaaggggacccaagt

SEQ ID NO: 9487 - DNA, 20 bp, Artificial Sequence
  Description of Artificial Sequence: Synthetic oligonucleotide
  Target: ANGPTL4; (-) strand; PAM type: NRG; PAM sequence: TGG
agtgtggaaggggacccaag

SEQ ID NO: 9488 - DNA, 20 bp, Artificial Sequence
  Description of Artificial Sequence: Synthetic oligonucleotide
  Target: ANGPTL4; (-) strand; PAM type: NRG; PAM sequence: AAG
cacagtgtggaaggggaccc

SEQ ID NO: 9489 - DNA, 20 bp, Artificial Sequence
  Description of Artificial Sequence: Synthetic oligonucleotide
  Target: ANGPTL4; (-) strand; PAM type: NRG; PAM sequence: GGG
aagcttccacagtgtggaag

SEQ ID NO: 9490 - DNA, 20 bp, Artificial Sequence
  Description of Artificial Sequence: Synthetic oligonucleotide
  Target: ANGPTL4; (-) strand; PAM type: NRG; PAM sequence: GGG
aaagcttccacagtgtggaa

SEQ ID NO: 9491 - DNA, 20 bp, Artificial Sequence
  Description of Artificial Sequence: Synthetic oligonucleotide
  Target: ANGPTL4; (-) strand; PAM type: NRG; PAM sequence: AGG
caaagcttccacagtgtgga

SEQ ID NO: 9492 - DNA, 20 bp, Artificial Sequence
  Description of Artificial Sequence: Synthetic oligonucleotide
  Target: ANGPTL4; (-) strand; PAM type: NRG; PAM sequence: AAG
acaaagcttccacagtgtgg

SEQ ID NO: 9493 - DNA, 20 bp, Artificial Sequence
  Description of Artificial Sequence: Synthetic oligonucleotide
  Target: ANGPTL4; (-) strand; PAM type: NRG; PAM sequence: TGG
agaacaaagcttccacagtg

SEQ ID NO: 9494 - DNA, 20 bp, Artificial Sequence
  Description of Artificial Sequence: Synthetic oligonucleotide
  Target: ANGPTL4; (-) strand; PAM type: NRG; PAM sequence: CAG
gcaaaagaacaaagcttcca

SEQ ID NO: 9495 - DNA, 20 bp, Artificial Sequence
  Description of Artificial Sequence: Synthetic oligonucleotide
  Target: ANGPTL4; (-) strand; PAM type: NRG; PAM sequence: AAG
ttgcaaagagcaaaagaaca

SEQ ID NO: 9496 - DNA, 20 bp, Artificial Sequence
  Description of Artificial Sequence: Synthetic oligonucleotide
  Target: ANGPTL4; (-) strand; PAM type: NRG; PAM sequence: AAG
agatttattgcaaagagcaa

SEQ ID NO: 9497 - DNA, 20 bp, Artificial Sequence
  Description of Artificial Sequence: Synthetic oligonucleotide
  Target: ANGPTL4; (-) strand; PAM type: NRG; PAM sequence: GAG
agtacaagatttattgcaaa

SEQ ID NO: 9498 - DNA, 20 bp, Artificial Sequence
  Description of Artificial Sequence: Synthetic oligonucleotide
  Target: ANGPTL4; (-) strand; PAM type: NRG; PAM sequence: AAG
gcagtacaagatttattgca

SEQ ID NO: 9499 - DNA, 20 bp, Artificial Sequence
  Description of Artificial Sequence: Synthetic oligonucleotide
  Target: ANGPTL4; (-) strand; PAM type: NRG; PAM sequence: AAG
acccaaagagtgagcagtac

SEQ ID NO: 9500 - DNA, 20 bp, Artificial Sequence
  Description of Artificial Sequence: Synthetic oligonucleotide
  Target: ANGPTL4; (-) strand; PAM type: NRG; PAM sequence: CAG
gtggggacccaaagagtgag

SEQ ID NO: 9501 - DNA, 20 bp, Artificial Sequence
  Description of Artificial Sequence: Synthetic oligonucleotide
  Target: ANGPTL4; (-) strand; PAM type: NRG; PAM sequence: GAG
gcagtggggacccaaagagt

SEQ ID NO: 9502 - DNA, 20 bp, Artificial Sequence
  Description of Artificial Sequence: Synthetic oligonucleotide
  Target: ANGPTL4; (-) strand; PAM type: NRG; PAM sequence: GAG
aaaagcagtggggacccaaa

SEQ ID NO: 9503 - DNA, 20 bp, Artificial Sequence
  Description of Artificial Sequence: Synthetic oligonucleotide
  Target: ANGPTL4; (-) strand; PAM type: NRG; PAM sequence: AAG
ataaaagcagtggggaccca

SEQ ID NO: 9504 - DNA, 20 bp, Artificial Sequence
  Description of Artificial Sequence: Synthetic oligonucleotide
  Target: ANGPTL4; (-) strand; PAM type: NRG; PAM sequence: GGG
tacagctcataaaagcagtg

SEQ ID NO: 9505 - DNA, 20 bp, Artificial Sequence
  Description of Artificial Sequence: Synthetic oligonucleotide
  Target: ANGPTL4; (-) strand; PAM type: NRG; PAM sequence: GGG
ttacagctcataaaagcagt

SEQ ID NO: 9506 - DNA, 20 bp, Artificial Sequence
  Description of Artificial Sequence: Synthetic oligonucleotide
  Target: ANGPTL4; (-) strand; PAM type: NRG; PAM sequence: TGG
gttacagctcataaaagcag

SEQ ID NO: 9507 - DNA, 20 bp, Artificial Sequence
  Description of Artificial Sequence: Synthetic oligonucleotide
  Target: ANGPTL4; (-) strand; PAM type: NRG; PAM sequence: CAG
agtgttacagctcataaaag

SEQ ID NO: 9508 - DNA, 20 bp, Artificial Sequence
  Description of Artificial Sequence: Synthetic oligonucleotide
  Target: ANGPTL4; (-) strand; PAM type: NRG; PAM sequence: AAG
gtgagtgttacagctcataa

SEQ ID NO: 9509 - DNA, 20 bp, Artificial Sequence
  Description of Artificial Sequence: Synthetic oligonucleotide
  Target: ANGPTL4; (-) strand; PAM type: NRG; PAM sequence: CAG
gaccttcgcagtgagtgtta

SEQ ID NO: 9510 - DNA, 20 bp, Artificial Sequence
  Description of Artificial Sequence: Synthetic oligonucleotide
  Target: ANGPTL4; (-) strand; PAM type: NRG; PAM sequence: GAG
aagctgcagaccttcgcagt

SEQ ID NO: 9511 - DNA, 20 bp, Artificial Sequence
  Description of Artificial Sequence: Synthetic oligonucleotide
  Target: ANGPTL4; (-) strand; PAM type: NRG; PAM sequence: CAG
agtgaagctgcagaccttcg

SEQ ID NO: 9512 - DNA, 20 bp, Artificial Sequence
  Description of Artificial Sequence: Synthetic oligonucleotide
  Target: ANGPTL4; (-) strand; PAM type: NRG; PAM sequence: CAG
ctggctcaggagtgaagctg

SEQ ID NO: 9513 - DNA, 20 bp, Artificial Sequence
  Description of Artificial Sequence: Synthetic oligonucleotide
  Target: ANGPTL4; (-) strand; PAM type: NRG; PAM sequence: AAG
gtttcactggctcaggagtg

SEQ ID NO: 9514 - DNA, 20 bp, Artificial Sequence
  Description of Artificial Sequence: Synthetic oligonucleotide
  Target: ANGPTL4; (-) strand; PAM type: NRG; PAM sequence: GAG
tcatggtttcactggctcag

SEQ ID NO: 9515 - DNA, 20 bp, Artificial Sequence
  Description of Artificial Sequence: Synthetic oligonucleotide
  Target: ANGPTL4; (-) strand; PAM type: NRG; PAM sequence: AGG
gttcatggtttcactggctc

SEQ ID NO: 9516 - DNA, 20 bp, Artificial Sequence
  Description of Artificial Sequence: Synthetic oligonucleotide
  Target: ANGPTL4; (-) strand; PAM type: NRG; PAM sequence: CAG
ggttcatggtttcactggct

SEQ ID NO: 9517 - DNA, 20 bp, Artificial Sequence
  Description of Artificial Sequence: Synthetic oligonucleotide
  Target: ANGPTL4; (-) strand; PAM type: NRG; PAM sequence: TGG
tggtgggttcatggtttcac

SEQ ID NO: 9518 - DNA, 20 bp, Artificial Sequence
  Description of Artificial Sequence: Synthetic oligonucleotide
  Target: ANGPTL4; (-) strand; PAM type: NRG; PAM sequence: TGG
tcttccttctggtgggttca

SEQ ID NO: 9519 - DNA, 20 bp, Artificial Sequence
  Description of Artificial Sequence: Synthetic oligonucleotide
  Target: ANGPTL4; (-) strand; PAM type: NRG; PAM sequence: GGG
cagcgtttcttccttctggt

SEQ ID NO: 9520 - DNA, 20 bp, Artificial Sequence
  Description of Artificial Sequence: Synthetic oligonucleotide
  Target: ANGPTL4; (-) strand; PAM type: NRG; PAM sequence: TGG
tcagcgtttcttccttctgg

SEQ ID NO: 9521 - DNA, 20 bp, Artificial Sequence
  Description of Artificial Sequence: Synthetic oligonucleotide
  Target: ANGPTL4; (-) strand; PAM type: NRG; PAM sequence: TGG
tgttcagcgtttcttccttc

SEQ ID NO: 9522 - DNA, 20 bp, Artificial Sequence
  Description of Artificial Sequence: Synthetic oligonucleotide
  Target: ANGPTL4; (-) strand; PAM type: NRG; PAM sequence: CAG
ttctgatgttcaggtgtgtt

SEQ ID NO: 9523 - DNA, 20 bp, Artificial Sequence
  Description of Artificial Sequence: Synthetic oligonucleotide
  Target: ANGPTL4; (-) strand; PAM type: NRG; PAM sequence: AGG
gtttgtttcttctgatgttc

SEQ ID NO: 9524 - DNA, 20 bp, Artificial Sequence
  Description of Artificial Sequence: Synthetic oligonucleotide
  Target: ANGPTL4; (-) strand; PAM type: NRG; PAM sequence: CAG
agtttgtttcttctgatgtt

SEQ ID NO: 9525 - DNA, 20 bp, Artificial Sequence
  Description of Artificial Sequence: Synthetic oligonucleotide
  Target: ANGPTL4; (-) strand; PAM type: NRG; PAM sequence: GAG
ctcttaaggtggcgcgtctg

SEQ ID NO: 9526 - DNA, 20 bp, Artificial Sequence
  Description of Artificial Sequence: Synthetic oligonucleotide
  Target: ANGPTL4; (-) strand; PAM type: NRG; PAM sequence: TGG
agctcttaaggtggcgcgtc

SEQ ID NO: 9527 - DNA, 20 bp, Artificial Sequence
  Description of Artificial Sequence: Synthetic oligonucleotide
  Target: ANGPTL4; (-) strand; PAM type: NRG; PAM sequence: TGG
aagtgttccagctcttaagg

SEQ ID NO: 9528 - DNA, 20 bp, Artificial Sequence
  Description of Artificial Sequence: Synthetic oligonucleotide
  Target: ANGPTL4; (-) strand; PAM type: NRG; PAM sequence: AGG
ggtaagtgttccagctctta

SEQ ID NO: 9529 - DNA, 20 bp, Artificial Sequence
  Description of Artificial Sequence: Synthetic oligonucleotide
  Target: ANGPTL4; (-) strand; PAM type: NRG; PAM sequence: AAG
cggtaagtgttccagctctt

SEQ ID NO: 9530 - DNA, 20 bp, Artificial Sequence
  Description of Artificial Sequence: Synthetic oligonucleotide
  Target: ANGPTL4; (-) strand; PAM type: NRG; PAM sequence: CAG
gacccttgcggtaagtgttc

SEQ ID NO: 9531 - DNA, 20 bp, Artificial Sequence
  Description of Artificial Sequence: Synthetic oligonucleotide
  Target: ANGPTL4; (-) strand; PAM type: NRG; PAM sequence: AAG
aagccatggacccttgcggt

SEQ ID NO: 9532 - DNA, 20 bp, Artificial Sequence
  Description of Artificial Sequence: Synthetic oligonucleotide
  Target: ANGPTL4; (-) strand; PAM type: NRG; PAM sequence: CGG
aatgaagccatggacccttg

SEQ ID NO: 9533 - DNA, 20 bp, Artificial Sequence
  Description of Artificial Sequence: Synthetic oligonucleotide
  Target: ANGPTL4; (-) strand; PAM type: NRG; PAM sequence: TGG
tgacttcaagaatgaagcca

SEQ ID NO: 9534 - DNA, 20 bp, Artificial Sequence
  Description of Artificial Sequence: Synthetic oligonucleotide
  Target: ANGPTL4; (-) strand; PAM type: NRG; PAM sequence: AAG
tctcactgacttcaagaatg

SEQ ID NO: 9535 - DNA, 20 bp, Artificial Sequence
  Description of Artificial Sequence: Synthetic oligonucleotide
  Target: ANGPTL4; (-) strand; PAM type: NRG; PAM sequence: AAG
ttcttggtctcactgacttc

SEQ ID NO: 9536 - DNA, 20 bp, Artificial Sequence
  Description of Artificial Sequence: Synthetic oligonucleotide
  Target: ANGPTL4; (-) strand; PAM type: NRG; PAM sequence: TGG
atccggaattggggggttct

SEQ ID NO: 9537 - DNA, 20 bp, Artificial Sequence
  Description of Artificial Sequence: Synthetic oligonucleotide
  Target: ANGPTL4; (-) strand; PAM type: NRG; PAM sequence: GGG
gcactgtatccggaattggg

SEQ ID NO: 9538 - DNA, 20 bp, Artificial Sequence
  Description of Artificial Sequence: Synthetic oligonucleotide
  Target: ANGPTL4; (-) strand; PAM type: NRG; PAM sequence: GGG
ggcactgtatccggaattgg

SEQ ID NO: 9539 - DNA, 20 bp, Artificial Sequence
  Description of Artificial Sequence: Synthetic oligonucleotide
  Target: ANGPTL4; (-) strand; PAM type: NRG; PAM sequence: GGG
tggcactgtatccggaattg

SEQ ID NO: 9540 - DNA, 20 bp, Artificial Sequence
  Description of Artificial Sequence: Synthetic oligonucleotide
  Target: ANGPTL4; (-) strand; PAM type: NRG; PAM sequence: GGG
gtggcactgtatccggaatt

SEQ ID NO: 9541 - DNA, 20 bp, Artificial Sequence
  Description of Artificial Sequence: Synthetic oligonucleotide
  Target: ANGPTL4; (-) strand; PAM type: NRG; PAM sequence: TGG
agtggcactgtatccggaat

SEQ ID NO: 9542 - DNA, 20 bp, Artificial Sequence
  Description of Artificial Sequence: Synthetic oligonucleotide
  Target: ANGPTL4; (-) strand; PAM type: NRG; PAM sequence: CGG
gagtgcagtggcactgtatc

SEQ ID NO: 9543 - DNA, 20 bp, Artificial Sequence
  Description of Artificial Sequence: Synthetic oligonucleotide
  Target: ANGPTL4; (-) strand; PAM type: NRG; PAM sequence: TGG
ttgcctgggctggagtgcag

SEQ ID NO: 9544 - DNA, 20 bp, Artificial Sequence
  Description of Artificial Sequence: Synthetic oligonucleotide
  Target: ANGPTL4; (-) strand; PAM type: NRG; PAM sequence: CAG
ctgttgcctgggctggagtg

SEQ ID NO: 9545 - DNA, 20 bp, Artificial Sequence
  Description of Artificial Sequence: Synthetic oligonucleotide
  Target: ANGPTL4; (-) strand; PAM type: NRG; PAM sequence: GAG
tcgctctgttgcctgggctg

SEQ ID NO: 9546 - DNA, 20 bp, Artificial Sequence
  Description of Artificial Sequence: Synthetic oligonucleotide
  Target: ANGPTL4; (-) strand; PAM type: NRG; PAM sequence: TGG
tctcgctctgttgcctgggc

SEQ ID NO: 9547 - DNA, 20 bp, Artificial Sequence
  Description of Artificial Sequence: Synthetic oligonucleotide
  Target: ANGPTL4; (-) strand; PAM type: NRG; PAM sequence: GGG
agaatctcgctctgttgcct

SEQ ID NO: 9548 - DNA, 20 bp, Artificial Sequence
  Description of Artificial Sequence: Synthetic oligonucleotide
  Target: ANGPTL4; (-) strand; PAM type: NRG; PAM sequence: TGG
cagaatctcgctctgttgcc

SEQ ID NO: 9549 - DNA, 20 bp, Artificial Sequence
  Description of Artificial Sequence: Synthetic oligonucleotide
  Target: ANGPTL4; (-) strand; PAM type: NRG; PAM sequence: CAG
ttatttatttattttttaga

SEQ ID NO: 9550 - DNA, 20 bp, Artificial Sequence
  Description of Artificial Sequence: Synthetic oligonucleotide
  Target: ANGPTL4; (-) strand; PAM type: NRG; PAM sequence: TAG
atatttatttatttattttt

SEQ ID NO: 9551 - DNA, 20 bp, Artificial Sequence
  Description of Artificial Sequence: Synthetic oligonucleotide
  Target: ANGPTL4; (-) strand; PAM type: NRG; PAM sequence: GGG
aaatacatgtcctagatgta

SEQ ID NO: 9552 - DNA, 20 bp, Artificial Sequence
  Description of Artificial Sequence: Synthetic oligonucleotide
  Target: ANGPTL4; (-) strand; PAM type: NRG; PAM sequence: AGG
caaatacatgtcctagatgt

SEQ ID NO: 9553 - DNA, 20 bp, Artificial Sequence
  Description of Artificial Sequence: Synthetic oligonucleotide
  Target: ANGPTL4; (-) strand; PAM type: NRG; PAM sequence: TAG
tcaaatacatgtcctagatg

SEQ ID NO: 9554 - DNA, 20 bp, Artificial Sequence
  Description of Artificial Sequence: Synthetic oligonucleotide
  Target: ANGPTL4; (-) strand; PAM type: NRG; PAM sequence: TAG
ttttcctcaaatacatgtcc

SEQ ID NO: 9555 - DNA, 20 bp, Artificial Sequence
  Description of Artificial Sequence: Synthetic oligonucleotide
  Target: ANGPTL4; (-) strand; PAM type: NRG; PAM sequence: TGG
gttcagaaaatggacagatg

SEQ ID NO: 9556 - DNA, 20 bp, Artificial Sequence
  Description of Artificial Sequence: Synthetic oligonucleotide
  Target: ANGPTL4; (-) strand; PAM type: NRG; PAM sequence: CAG
gctggggttcagaaaatgga

SEQ ID NO: 9557 - DNA, 20 bp, Artificial Sequence
  Description of Artificial Sequence: Synthetic oligonucleotide
  Target: ANGPTL4; (-) strand; PAM type: NRG; PAM sequence: TGG
agcagctggggttcagaaaa

SEQ ID NO: 9558 - DNA, 20 bp, Artificial Sequence
  Description of Artificial Sequence: Synthetic oligonucleotide
  Target: ANGPTL4; (-) strand; PAM type: NRG; PAM sequence: CAG
aattaacagcagctggggtt

SEQ ID NO: 9559 - DNA, 20 bp, Artificial Sequence
  Description of Artificial Sequence: Synthetic oligonucleotide
  Target: ANGPTL4; (-) strand; PAM type: NRG; PAM sequence: GGG
aaaaaaattaacagcagctg

SEQ ID NO: 9560 - DNA, 20 bp, Artificial Sequence
  Description of Artificial Sequence: Synthetic oligonucleotide
  Target: ANGPTL4; (-) strand; PAM type: NRG; PAM sequence: GGG
aaaaaaaattaacagcagct

SEQ ID NO: 9561 - DNA, 20 bp, Artificial Sequence
  Description of Artificial Sequence: Synthetic oligonucleotide
  Target: ANGPTL4; (-) strand; PAM type: NRG; PAM sequence: TGG
aaaaaaaaattaacagcagc

SEQ ID NO: 9562 - DNA, 20 bp, Artificial Sequence
  Description of Artificial Sequence: Synthetic oligonucleotide
  Target: ANGPTL4; (-) strand; PAM type: NRG; PAM sequence: CAG
aaaaaaaaaaaaattaacag

SEQ ID NO: 9563 - DNA, 20 bp, Artificial Sequence
  Description of Artificial Sequence: Synthetic oligonucleotide
  Target: ANGPTL4; (-) strand; PAM type: NRG; PAM sequence: CAG
aaaaaaaaaaaaaaaattaa

SEQ ID NO: 9564 - DNA, 20 bp, Artificial Sequence
  Description of Artificial Sequence: Synthetic oligonucleotide
  Target: ANGPTL4; (-) strand; PAM type: NRG; PAM sequence: CGG
acagagtgagactcttgtct

SEQ ID NO: 9565 - DNA, 20 bp, Artificial Sequence
  Description of Artificial Sequence: Synthetic oligonucleotide
  Target: ANGPTL4; (-) strand; PAM type: NRG; PAM sequence: GAG
tccagcctgggtgacagagt

SEQ ID NO: 9566 - DNA, 20 bp, Artificial Sequence
  Description of Artificial Sequence: Synthetic oligonucleotide
  Target: ANGPTL4; (-) strand; PAM type: NRG; PAM sequence: GAG
gcgctccagcctgggtgaca

SEQ ID NO: 9567 - DNA, 20 bp, Artificial Sequence
  Description of Artificial Sequence: Synthetic oligonucleotide
  Target: ANGPTL4; (-) strand; PAM type: NRG; PAM sequence: CAG
ccgcgctccagcctgggtga

SEQ ID NO: 9568 - DNA, 20 bp, Artificial Sequence
  Description of Artificial Sequence: Synthetic oligonucleotide
  Target: ANGPTL4; (-) strand; PAM type: NRG; PAM sequence: GGG
gcactaccgcgctccagcct

SEQ ID NO: 9569 - DNA, 20 bp, Artificial Sequence
  Description of Artificial Sequence: Synthetic oligonucleotide
  Target: ANGPTL4; (-) strand; PAM type: NRG; PAM sequence: TGG
cgcactaccgcgctccagcc

SEQ ID NO: 9570 - DNA, 20 bp, Artificial Sequence
  Description of Artificial Sequence: Synthetic oligonucleotide
  Target: ANGPTL4; (-) strand; PAM type: NRG; PAM sequence: CAG
gagatcgcactaccgcgctc

SEQ ID NO: 9571 - DNA, 20 bp, Artificial Sequence
  Description of Artificial Sequence: Synthetic oligonucleotide
  Target: ANGPTL4; (-) strand; PAM type: NRG; PAM sequence: GAG
ggtggaggttgcagtaagct

SEQ ID NO: 9572 - DNA, 20 bp, Artificial Sequence
  Description of Artificial Sequence: Synthetic oligonucleotide
  Target: ANGPTL4; (-) strand; PAM type: NRG; PAM sequence: AAG
cgggaggtggaggttgcagt

SEQ ID NO: 9573 - DNA, 20 bp, Artificial Sequence
  Description of Artificial Sequence: Synthetic oligonucleotide
  Target: ANGPTL4; (-) strand; PAM type: NRG; PAM sequence: CAG
aacccgggaggtggaggttg

SEQ ID NO: 9574 - DNA, 20 bp, Artificial Sequence
  Description of Artificial Sequence: Synthetic oligonucleotide
  Target: ANGPTL4; (-) strand; PAM type: NRG; PAM sequence: AGG
cgcttgaacccgggaggtgg

SEQ ID NO: 9575 - DNA, 20 bp, Artificial Sequence
  Description of Artificial Sequence: Synthetic oligonucleotide
  Target: ANGPTL4; (-) strand; PAM type: NRG; PAM sequence: GAG
tcgcttgaacccgggaggtg

SEQ ID NO: 9576 - DNA, 20 bp, Artificial Sequence
  Description of Artificial Sequence: Synthetic oligonucleotide
  Target: ANGPTL4; (-) strand; PAM type: NRG; PAM sequence: TGG
aatcgcttgaacccgggagg

SEQ ID NO: 9577 - DNA, 20 bp, Artificial Sequence
  Description of Artificial Sequence: Synthetic oligonucleotide
  Target: ANGPTL4; (-) strand; PAM type: NRG; PAM sequence: AGG
gagaatcgcttgaacccggg

SEQ ID NO: 9578 - DNA, 20 bp, Artificial Sequence
  Description of Artificial Sequence: Synthetic oligonucleotide
  Target: ANGPTL4; (-) strand; PAM type: NRG; PAM sequence: GAG
ggagaatcgcttgaacccgg

SEQ ID NO: 9579 - DNA, 20 bp, Artificial Sequence
  Description of Artificial Sequence: Synthetic oligonucleotide
  Target: ANGPTL4; (-) strand; PAM type: NRG; PAM sequence: GGG
caggagaatcgcttgaaccc

SEQ ID NO: 9580 - DNA, 20 bp, Artificial Sequence
  Description of Artificial Sequence: Synthetic oligonucleotide
  Target: ANGPTL4; (-) strand; PAM type: NRG; PAM sequence: CGG
gcaggagaatcgcttgaacc

SEQ ID NO: 9581 - DNA, 20 bp, Artificial Sequence
  Description of Artificial Sequence: Synthetic oligonucleotide
  Target: ANGPTL4; (-) strand; PAM type: NRG; PAM sequence: GAG
tactcgggaggccgaggcag

SEQ ID NO: 9582 - DNA, 20 bp, Artificial Sequence
  Description of Artificial Sequence: Synthetic oligonucleotide
  Target: ANGPTL4; (-) strand; PAM type: NRG; PAM sequence: AGG
gctactcgggaggccgaggc

SEQ ID NO: 9583 - DNA, 20 bp, Artificial Sequence
  Description of Artificial Sequence: Synthetic oligonucleotide
  Target: ANGPTL4; (-) strand; PAM type: NRG; PAM sequence: CAG
agctactcgggaggccgagg

SEQ ID NO: 9584 - DNA, 20 bp, Artificial Sequence
  Description of Artificial Sequence: Synthetic oligonucleotide
  Target: ANGPTL4; (-) strand; PAM type: NRG; PAM sequence: AGG
ctcagctactcgggaggccg

SEQ ID NO: 9585 - DNA, 20 bp, Artificial Sequence
  Description of Artificial Sequence: Synthetic oligonucleotide
  Target: ANGPTL4; (-) strand; PAM type: NRG; PAM sequence: GAG
tctcagctactcgggaggcc

SEQ ID NO: 9586 - DNA, 20 bp, Artificial Sequence
  Description of Artificial Sequence: Synthetic oligonucleotide
  Target: ANGPTL4; (-) strand; PAM type: NRG; PAM sequence: AGG
tgtaatctcagctactcggg

SEQ ID NO: 9587 - DNA, 20 bp, Artificial Sequence
  Description of Artificial Sequence: Synthetic oligonucleotide
  Target: ANGPTL4; (-) strand; PAM type: NRG; PAM sequence: GAG
ctgtaatctcagctactcgg

SEQ ID NO: 9588 - DNA, 20 bp, Artificial Sequence
  Description of Artificial Sequence: Synthetic oligonucleotide
  Target: ANGPTL4; (-) strand; PAM type: NRG; PAM sequence: GGG
gcctgtaatctcagctactc

SEQ ID NO: 9589 - DNA, 20 bp, Artificial Sequence
  Description of Artificial Sequence: Synthetic oligonucleotide
  Target: ANGPTL4; (-) strand; PAM type: NRG; PAM sequence: CGG
cgcctgtaatctcagctact

SEQ ID NO: 9590 - DNA, 20 bp, Artificial Sequence
  Description of Artificial Sequence: Synthetic oligonucleotide
  Target: ANGPTL4; (-) strand; PAM type: NRG; PAM sequence: CAG
gtgggaggcgcctgtaatct

SEQ ID NO: 9591 - DNA, 20 bp, Artificial Sequence
  Description of Artificial Sequence: Synthetic oligonucleotide
  Target: ANGPTL4; (-) strand; PAM type: NRG; PAM sequence: AGG
aattagctgggtgcagtggg

SEQ ID NO: 9592 - DNA, 20 bp, Artificial Sequence
  Description of Artificial Sequence: Synthetic oligonucleotide
  Target: ANGPTL4; (-) strand; PAM type: NRG; PAM sequence: GAG
aaattagctgggtgcagtgg

SEQ ID NO: 9593 - DNA, 20 bp, Artificial Sequence
  Description of Artificial Sequence: Synthetic oligonucleotide
  Target: ANGPTL4; (-) strand; PAM type: NRG; PAM sequence: GGG
aaaaattagctgggtgcagt

SEQ ID NO: 9594 - DNA, 20 bp, Artificial Sequence
  Description of Artificial Sequence: Synthetic oligonucleotide
  Target: ANGPTL4; (-) strand; PAM type: NRG; PAM sequence: TGG
caaaaattagctgggtgcag

SEQ ID NO: 9595 - DNA, 20 bp, Artificial Sequence
  Description of Artificial Sequence: Synthetic oligonucleotide
  Target: ANGPTL4; (-) strand; PAM type: NRG; PAM sequence: CAG
atacaaaaattagctgggtg

SEQ ID NO: 9596 - DNA, 20 bp, Artificial Sequence
  Description of Artificial Sequence: Synthetic oligonucleotide
  Target: ANGPTL4; (-) strand; PAM type: NRG; PAM sequence: GGG
taaaaatacaaaaattagct

SEQ ID NO: 9597 - DNA, 20 bp, Artificial Sequence
  Description of Artificial Sequence: Synthetic oligonucleotide
  Target: ANGPTL4; (-) strand; PAM type: NRG; PAM sequence: TGG
ctaaaaatacaaaaattagc

SEQ ID NO: 9598 - DNA, 20 bp, Artificial Sequence
  Description of Artificial Sequence: Synthetic oligonucleotide
  Target: ANGPTL4; (-) strand; PAM type: NRG; PAM sequence: TAG
tatactaaaaatacaaaaat

SEQ ID NO: 9599 - DNA, 20 bp, Artificial Sequence
  Description of Artificial Sequence: Synthetic oligonucleotide
  Target: ANGPTL4; (-) strand; PAM type: NRG; PAM sequence: TGG
tcaggagtttgagaccagcc

SEQ ID NO: 9600 - DNA, 20 bp, Artificial Sequence
  Description of Artificial Sequence: Synthetic oligonucleotide
  Target: ANGPTL4; (-) strand; PAM type: NRG; PAM sequence: CAG
tgaggtcaggagtttgagac

SEQ ID NO: 9601 - DNA, 20 bp, Artificial Sequence
  Description of Artificial Sequence: Synthetic oligonucleotide
  Target: ANGPTL4; (-) strand; PAM type: NRG; PAM sequence: GAG
tcacttgaggtcaggagttt

SEQ ID NO: 9602 - DNA, 20 bp, Artificial Sequence
  Description of Artificial Sequence: Synthetic oligonucleotide
  Target: ANGPTL4; (-) strand; PAM type: NRG; PAM sequence: GAG
ggcagatcacttgaggtcag

SEQ ID NO: 9603 - DNA, 20 bp, Artificial Sequence
  Description of Artificial Sequence: Synthetic oligonucleotide
  Target: ANGPTL4; (-) strand; PAM type: NRG; PAM sequence: AGG
cgggcagatcacttgaggtc

SEQ ID NO: 9604 - DNA, 20 bp, Artificial Sequence
  Description of Artificial Sequence: Synthetic oligonucleotide
  Target: ANGPTL4; (-) strand; PAM type: NRG; PAM sequence: CAG
gcgggcagatcacttgaggt

SEQ ID NO: 9605 - DNA, 20 bp, Artificial Sequence
  Description of Artificial Sequence: Synthetic oligonucleotide
  Target: ANGPTL4; (-) strand; PAM type: NRG; PAM sequence: AGG
cgaggcgggcagatcacttg

SEQ ID NO: 9606 - DNA, 20 bp, Artificial Sequence
  Description of Artificial Sequence: Synthetic oligonucleotide
  Target: ANGPTL4; (-) strand; PAM type: NRG; PAM sequence: GAG
ccgaggcgggcagatcactt

SEQ ID NO: 9607 - DNA, 20 bp, Artificial Sequence
  Description of Artificial Sequence: Synthetic oligonucleotide
  Target: ANGPTL4; (-) strand; PAM type: NRG; PAM sequence: CAG
gtttcggaggccgaggcggg

SEQ ID NO: 9608 - DNA, 20 bp, Artificial Sequence
  Description of Artificial Sequence: Synthetic oligonucleotide
  Target: ANGPTL4; (-) strand; PAM type: NRG; PAM sequence: GGG
ccagtttcggaggccgaggc

SEQ ID NO: 9609 - DNA, 20 bp, Artificial Sequence
  Description of Artificial Sequence: Synthetic oligonucleotide
  Target: ANGPTL4; (-) strand; PAM type: NRG; PAM sequence: CGG
accagtttcggaggccgagg

SEQ ID NO: 9610 - DNA, 20 bp, Artificial Sequence
  Description of Artificial Sequence: Synthetic oligonucleotide
  Target: ANGPTL4; (-) strand; PAM type: NRG; PAM sequence: AGG
cccaccagtttcggaggccg

SEQ ID NO: 9611 - DNA, 20 bp, Artificial Sequence
  Description of Artificial Sequence: Synthetic oligonucleotide
  Target: ANGPTL4; (-) strand; PAM type: NRG; PAM sequence: GAG
tcccaccagtttcggaggcc

SEQ ID NO: 9612 - DNA, 20 bp, Artificial Sequence
  Description of Artificial Sequence: Synthetic oligonucleotide
  Target: ANGPTL4; (-) strand; PAM type: NRG; PAM sequence: AGG
tgtaatcccaccagtttcgg

SEQ ID NO: 9613 - DNA, 20 bp, Artificial Sequence
  Description of Artificial Sequence: Synthetic oligonucleotide
  Target: ANGPTL4; (-) strand; PAM type: NRG; PAM sequence: GAG
ctgtaatcccaccagtttcg

SEQ ID NO: 9614 - DNA, 20 bp, Artificial Sequence
  Description of Artificial Sequence: Synthetic oligonucleotide
  Target: ANGPTL4; (-) strand; PAM type: NRG; PAM sequence: CGG
gcctgtaatcccaccagttt

SEQ ID NO: 9615 - DNA, 20 bp, Artificial Sequence
  Description of Artificial Sequence: Synthetic oligonucleotide
  Target: ANGPTL4; (-) strand; PAM type: NRG; PAM sequence: CAG
gcttgcgcctgtaatcccac

SEQ ID NO: 9616 - DNA, 20 bp, Artificial Sequence
  Description of Artificial Sequence: Synthetic oligonucleotide
  Target: ANGPTL4; (-) strand; PAM type: NRG; PAM sequence: TGG
aattaacaggccgggcacag

SEQ ID NO: 9617 - DNA, 20 bp, Artificial Sequence
  Description of Artificial Sequence: Synthetic oligonucleotide
  Target: ANGPTL4; (-) strand; PAM type: NRG; PAM sequence: CAG
ataaattaacaggccgggca

SEQ ID NO: 9618 - DNA, 20 bp, Artificial Sequence
  Description of Artificial Sequence: Synthetic oligonucleotide
  Target: ANGPTL4; (-) strand; PAM type: NRG; PAM sequence: GGG
caaaaataaattaacaggcc

SEQ ID NO: 9619 - DNA, 20 bp, Artificial Sequence
  Description of Artificial Sequence: Synthetic oligonucleotide
  Target: ANGPTL4; (-) strand; PAM type: NRG; PAM sequence: CGG
gcaaaaataaattaacaggc

SEQ ID NO: 9620 - DNA, 20 bp, Artificial Sequence
  Description of Artificial Sequence: Synthetic oligonucleotide
  Target: ANGPTL4; (-) strand; PAM type: NRG; PAM sequence: AGG
tggggcaaaaataaattaac

SEQ ID NO: 9621 - DNA, 20 bp, Artificial Sequence
  Description of Artificial Sequence: Synthetic oligonucleotide
  Target: ANGPTL4; (-) strand; PAM type: NRG; PAM sequence: CAG
ctggggcaaaaataaattaa

SEQ ID NO: 9622 - DNA, 20 bp, Artificial Sequence
  Description of Artificial Sequence: Synthetic oligonucleotide
  Target: ANGPTL4; (-) strand; PAM type: NRG; PAM sequence: GGG
atatttggagggagatactg

SEQ ID NO: 9623 - DNA, 20 bp, Artificial Sequence
  Description of Artificial Sequence: Synthetic oligonucleotide
  Target: ANGPTL4; (-) strand; PAM type: NRG; PAM sequence: GGG
aatatttggagggagatact

SEQ ID NO: 9624 - DNA, 20 bp, Artificial Sequence
  Description of Artificial Sequence: Synthetic oligonucleotide
  Target: ANGPTL4; (-) strand; PAM type: NRG; PAM sequence: TGG
gaatatttggagggagatac

SEQ ID NO: 9625 - DNA, 20 bp, Artificial Sequence
  Description of Artificial Sequence: Synthetic oligonucleotide
  Target: ANGPTL4; (-) strand; PAM type: NRG; PAM sequence: GAG
ctataaggaatatttggagg

SEQ ID NO: 9626 - DNA, 20 bp, Artificial Sequence
  Description of Artificial Sequence: Synthetic oligonucleotide
  Target: ANGPTL4; (-) strand; PAM type: NRG; PAM sequence: GGG
atctataaggaatatttgga

SEQ ID NO: 9627 - DNA, 20 bp, Artificial Sequence
  Description of Artificial Sequence: Synthetic oligonucleotide
  Target: ANGPTL4; (-) strand; PAM type: NRG; PAM sequence: AGG
catctataaggaatatttgg

SEQ ID NO: 9628 - DNA, 20 bp, Artificial Sequence
  Description of Artificial Sequence: Synthetic oligonucleotide
  Target: ANGPTL4; (-) strand; PAM type: NRG; PAM sequence: GAG
acatctataaggaatatttg

SEQ ID NO: 9629 - DNA, 20 bp, Artificial Sequence
  Description of Artificial Sequence: Synthetic oligonucleotide
  Target: ANGPTL4; (-) strand; PAM type: NRG; PAM sequence: TGG
agacatctataaggaatatt

SEQ ID NO: 9630 - DNA, 20 bp, Artificial Sequence
  Description of Artificial Sequence: Synthetic oligonucleotide
  Target: ANGPTL4; (-) strand; PAM type: NRG; PAM sequence: AGG
ctccccaagagacatctata

SEQ ID NO: 9631 - DNA, 20 bp, Artificial Sequence
  Description of Artificial Sequence: Synthetic oligonucleotide
  Target: ANGPTL4; (-) strand; PAM type: NRG; PAM sequence: AAG
cctccccaagagacatctat

SEQ ID NO: 9632 - DNA, 20 bp, Artificial Sequence
  Description of Artificial Sequence: Synthetic oligonucleotide
  Target: ANGPTL4; (-) strand; PAM type: NRG; PAM sequence: GAG
aacccccaccacctccccaa

SEQ ID NO: 9633 - DNA, 20 bp, Artificial Sequence
  Description of Artificial Sequence: Synthetic oligonucleotide
  Target: ANGPTL4; (-) strand; PAM type: NRG; PAM sequence: AAG
agaacccccaccacctcccc

SEQ ID NO: 9634 - DNA, 20 bp, Artificial Sequence
  Description of Artificial Sequence: Synthetic oligonucleotide
  Target: ANGPTL4; (-) strand; PAM type: NRG; PAM sequence: AAG
gatattttttcttctagcgc

SEQ ID NO: 9635 - DNA, 20 bp, Artificial Sequence
  Description of Artificial Sequence: Synthetic oligonucleotide
  Target: ANGPTL4; (-) strand; PAM type: NRG; PAM sequence: TAG
atcacagatattttttcttc

SEQ ID NO: 9636 - DNA, 20 bp, Artificial Sequence
  Description of Artificial Sequence: Synthetic oligonucleotide
  Target: ANGPTL4; (-) strand; PAM type: NRG; PAM sequence: CAG
gggtcaagacaaggaaatca

SEQ ID NO: 9637 - DNA, 20 bp, Artificial Sequence
  Description of Artificial Sequence: Synthetic oligonucleotide
  Target: ANGPTL4; (-) strand; PAM type: NRG; PAM sequence: AGG
tgccaggaagggtcaagaca

SEQ ID NO: 9638 - DNA, 20 bp, Artificial Sequence
  Description of Artificial Sequence: Synthetic oligonucleotide
  Target: ANGPTL4; (-) strand; PAM type: NRG; PAM sequence: AAG
ctgccaggaagggtcaagac

SEQ ID NO: 9639 - DNA, 20 bp, Artificial Sequence
  Description of Artificial Sequence: Synthetic oligonucleotide
  Target: ANGPTL4; (-) strand; PAM type: NRG; PAM sequence: AAG
agcacctgccaggaagggtc

SEQ ID NO: 9640 - DNA, 20 bp, Artificial Sequence
  Description of Artificial Sequence: Synthetic oligonucleotide
  Target: ANGPTL4; (-) strand; PAM type: NRG; PAM sequence: GGG
tccccagcacctgccaggaa

SEQ ID NO: 9641 - DNA, 20 bp, Artificial Sequence
  Description of Artificial Sequence: Synthetic oligonucleotide
  Target: ANGPTL4; (-) strand; PAM type: NRG; PAM sequence: AGG
gtccccagcacctgccagga

SEQ ID NO: 9642 - DNA, 20 bp, Artificial Sequence
  Description of Artificial Sequence: Synthetic oligonucleotide
  Target: ANGPTL4; (-) strand; PAM type: NRG; PAM sequence: AAG
tgtccccagcacctgccagg

SEQ ID NO: 9643 - DNA, 20 bp, Artificial Sequence
  Description of Artificial Sequence: Synthetic oligonucleotide
  Target: ANGPTL4; (-) strand; PAM type: NRG; PAM sequence: AGG
ctgtgtccccagcacctgcc

SEQ ID NO: 9644 - DNA, 20 bp, Artificial Sequence
  Description of Artificial Sequence: Synthetic oligonucleotide
  Target: ANGPTL4; (-) strand; PAM type: NRG; PAM sequence: CAG
gctgtgtccccagcacctgc

SEQ ID NO: 9645 - DNA, 20 bp, Artificial Sequence
  Description of Artificial Sequence: Synthetic oligonucleotide
  Target: ANGPTL4; (-) strand; PAM type: NRG; PAM sequence: CAG
cagggaaacagctgtgtccc

SEQ ID NO: 9646 - DNA, 20 bp, Artificial Sequence
  Description of Artificial Sequence: Synthetic oligonucleotide
  Target: ANGPTL4; (-) strand; PAM type: NRG; PAM sequence: CAG
cagccacagccccagggaaa

SEQ ID NO: 9647 - DNA, 20 bp, Artificial Sequence
  Description of Artificial Sequence: Synthetic oligonucleotide
  Target: ANGPTL4; (-) strand; PAM type: NRG; PAM sequence: GGG
tatacccagccacagcccca

SEQ ID NO: 9648 - DNA, 20 bp, Artificial Sequence
  Description of Artificial Sequence: Synthetic oligonucleotide
  Target: ANGPTL4; (-) strand; PAM type: NRG; PAM sequence: AGG
ctatacccagccacagcccc

SEQ ID NO: 9649 - DNA, 20 bp, Artificial Sequence
  Description of Artificial Sequence: Synthetic oligonucleotide
  Target: ANGPTL4; (-) strand; PAM type: NRG; PAM sequence: CAG
cctatacccagccacagccc

SEQ ID NO: 9650 - DNA, 20 bp, Artificial Sequence
  Description of Artificial Sequence: Synthetic oligonucleotide
  Target: ANGPTL4; (-) strand; PAM type: NRG; PAM sequence: CAG
ttgtcacctatacccagcca

SEQ ID NO: 9651 - DNA, 20 bp, Artificial Sequence
  Description of Artificial Sequence: Synthetic oligonucleotide
  Target: ANGPTL4; (-) strand; PAM type: NRG; PAM sequence: CAG
aaaagtttgtcacctatacc

SEQ ID NO: 9652 - DNA, 20 bp, Artificial Sequence
  Description of Artificial Sequence: Synthetic oligonucleotide
  Target: ANGPTL4; (-) strand; PAM type: NRG; PAM sequence: AAG
cctacctctacaaagctaaa

SEQ ID NO: 9653 - DNA, 20 bp, Artificial Sequence
  Description of Artificial Sequence: Synthetic oligonucleotide
  Target: ANGPTL4; (-) strand; PAM type: NRG; PAM sequence: AAG
ctgtaggacctacctctaca

SEQ ID NO: 9654 - DNA, 20 bp, Artificial Sequence
  Description of Artificial Sequence: Synthetic oligonucleotide
  Target: ANGPTL4; (-) strand; PAM type: NRG; PAM sequence: AGG
ctccctggcctggcagctgt

SEQ ID NO: 9655 - DNA, 20 bp, Artificial Sequence
  Description of Artificial Sequence: Synthetic oligonucleotide
  Target: ANGPTL4; (-) strand; PAM type: NRG; PAM sequence: TAG
cctccctggcctggcagctg

SEQ ID NO: 9656 - DNA, 20 bp, Artificial Sequence
  Description of Artificial Sequence: Synthetic oligonucleotide
  Target: ANGPTL4; (-) strand; PAM type: NRG; PAM sequence: CAG
ctctagcctccctggcctgg

SEQ ID NO: 9657 - DNA, 20 bp, Artificial Sequence
  Description of Artificial Sequence: Synthetic oligonucleotide
  Target: ANGPTL4; (-) strand; PAM type: NRG; PAM sequence: TGG
agcctctagcctccctggcc

SEQ ID NO: 9658 - DNA, 20 bp, Artificial Sequence
  Description of Artificial Sequence: Synthetic oligonucleotide
  Target: ANGPTL4; (-) strand; PAM type: NRG; PAM sequence: TGG
agggcagcctctagcctccc

SEQ ID NO: 9659 - DNA, 20 bp, Artificial Sequence
  Description of Artificial Sequence: Synthetic oligonucleotide
  Target: ANGPTL4; (-) strand; PAM type: NRG; PAM sequence: TAG
aacctggagagggcagcctc

SEQ ID NO: 9660 - DNA, 20 bp, Artificial Sequence
  Description of Artificial Sequence: Synthetic oligonucleotide
  Target: ANGPTL4; (-) strand; PAM type: NRG; PAM sequence: CAG
aacaaggaacctggagaggg

SEQ ID NO: 9661 - DNA, 20 bp, Artificial Sequence
  Description of Artificial Sequence: Synthetic oligonucleotide
  Target: ANGPTL4; (-) strand; PAM type: NRG; PAM sequence: GGG
gcaaacaaggaacctggaga

SEQ ID NO: 9662 - DNA, 20 bp, Artificial Sequence
  Description of Artificial Sequence: Synthetic oligonucleotide
  Target: ANGPTL4; (-) strand; PAM type: NRG; PAM sequence: AGG
ggcaaacaaggaacctggag

SEQ ID NO: 9663 - DNA, 20 bp, Artificial Sequence
  Description of Artificial Sequence: Synthetic oligonucleotide
  Target: ANGPTL4; (-) strand; PAM type: NRG; PAM sequence: GAG
aggcaaacaaggaacctgga

SEQ ID NO: 9664 - DNA, 20 bp, Artificial Sequence
  Description of Artificial Sequence: Synthetic oligonucleotide
  Target: ANGPTL4; (-) strand; PAM type: NRG; PAM sequence: GAG
acaggcaaacaaggaacctg

SEQ ID NO: 9665 - DNA, 20 bp, Artificial Sequence
  Description of Artificial Sequence: Synthetic oligonucleotide
  Target: ANGPTL4; (-) strand; PAM type: NRG; PAM sequence: TGG
acacaggcaaacaaggaacc

SEQ ID NO: 9666 - DNA, 20 bp, Artificial Sequence
  Description of Artificial Sequence: Synthetic oligonucleotide
  Target: ANGPTL4; (-) strand; PAM type: NRG; PAM sequence: AGG
gtacaggacacaggcaaaca

SEQ ID NO: 9667 - DNA, 20 bp, Artificial Sequence
  Description of Artificial Sequence: Synthetic oligonucleotide
  Target: ANGPTL4; (-) strand; PAM type: NRG; PAM sequence: AAG
agtacaggacacaggcaaac

SEQ ID NO: 9668 - DNA, 20 bp, Artificial Sequence
  Description of Artificial Sequence: Synthetic oligonucleotide
  Target: ANGPTL4; (-) strand; PAM type: NRG; PAM sequence: AGG
gcctgctcagtacaggacac

SEQ ID NO: 9669 - DNA, 20 bp, Artificial Sequence
  Description of Artificial Sequence: Synthetic oligonucleotide
  Target: ANGPTL4; (-) strand; PAM type: NRG; PAM sequence: CAG
agcctgctcagtacaggaca

SEQ ID NO: 9670 - DNA, 20 bp, Artificial Sequence
  Description of Artificial Sequence: Synthetic oligonucleotide
  Target: ANGPTL4; (-) strand; PAM type: NRG; PAM sequence: AGG
cctctaagcctgctcagtac

SEQ ID NO: 9671 - DNA, 20 bp, Artificial Sequence
  Description of Artificial Sequence: Synthetic oligonucleotide
  Target: ANGPTL4; (-) strand; PAM type: NRG; PAM sequence: CAG
tcctctaagcctgctcagta

SEQ ID NO: 9672 - DNA, 20 bp, Artificial Sequence
  Description of Artificial Sequence: Synthetic oligonucleotide
  Target: ANGPTL4; (-) strand; PAM type: NRG; PAM sequence: CAG
ggagatcctctaagcctgct

SEQ ID NO: 9673 - DNA, 20 bp, Artificial Sequence
  Description of Artificial Sequence: Synthetic oligonucleotide
  Target: ANGPTL4; (-) strand; PAM type: NRG; PAM sequence: AAG
gggctcagaggagatcctct

SEQ ID NO: 9674 - DNA, 20 bp, Artificial Sequence
  Description of Artificial Sequence: Synthetic oligonucleotide
  Target: ANGPTL4; (-) strand; PAM type: NRG; PAM sequence: GAG
cagtgacagtgggctcagag

SEQ ID NO: 9675 - DNA, 20 bp, Artificial Sequence
  Description of Artificial Sequence: Synthetic oligonucleotide
  Target: ANGPTL4; (-) strand; PAM type: NRG; PAM sequence: AGG
tccagtgacagtgggctcag

SEQ ID NO: 9676 - DNA, 20 bp, Artificial Sequence
  Description of Artificial Sequence: Synthetic oligonucleotide
  Target: ANGPTL4; (-) strand; PAM type: NRG; PAM sequence: GAG
ctccagtgacagtgggctca

SEQ ID NO: 9677 - DNA, 20 bp, Artificial Sequence
  Description of Artificial Sequence: Synthetic oligonucleotide
  Target: ANGPTL4; (-) strand; PAM type: NRG; PAM sequence: CAG
agctccagtgacagtgggct

SEQ ID NO: 9678 - DNA, 20 bp, Artificial Sequence
  Description of Artificial Sequence: Synthetic oligonucleotide
  Target: ANGPTL4; (-) strand; PAM type: NRG; PAM sequence: GGG
ccaccagctccagtgacagt

SEQ ID NO: 9679 - DNA, 20 bp, Artificial Sequence
  Description of Artificial Sequence: Synthetic oligonucleotide
  Target: ANGPTL4; (-) strand; PAM type: NRG; PAM sequence: TGG
accaccagctccagtgacag

SEQ ID NO: 9680 - DNA, 20 bp, Artificial Sequence
  Description of Artificial Sequence: Synthetic oligonucleotide
  Target: ANGPTL4; (-) strand; PAM type: NRG; PAM sequence: CAG
ctcaccaccagctccagtga

SEQ ID NO: 9681 - DNA, 20 bp, Artificial Sequence
  Description of Artificial Sequence: Synthetic oligonucleotide
  Target: ANGPTL4; (-) strand; PAM type: NRG; PAM sequence: CAG
actggactcaccaccagctc

SEQ ID NO: 9682 - DNA, 20 bp, Artificial Sequence
  Description of Artificial Sequence: Synthetic oligonucleotide
  Target: ANGPTL4; (-) strand; PAM type: NRG; PAM sequence: CAG
ctgcagactggactcaccac

SEQ ID NO: 9683 - DNA, 20 bp, Artificial Sequence
  Description of Artificial Sequence: Synthetic oligonucleotide
  Target: ANGPTL4; (-) strand; PAM type: NRG; PAM sequence: TGG
gaaccccctctcctgcagac

SEQ ID NO: 9684 - DNA, 20 bp, Artificial Sequence
  Description of Artificial Sequence: Synthetic oligonucleotide
  Target: ANGPTL4; (-) strand; PAM type: NRG; PAM sequence: CAG
tagaggaaccccctctcctg

SEQ ID NO: 9685 - DNA, 20 bp, Artificial Sequence
  Description of Artificial Sequence: Synthetic oligonucleotide
  Target: ANGPTL4; (-) strand; PAM type: NRG; PAM sequence: AGG
aatgaagagggtgtggctag

SEQ ID NO: 9686 - DNA, 20 bp, Artificial Sequence
  Description of Artificial Sequence: Synthetic oligonucleotide
  Target: ANGPTL4; (-) strand; PAM type: NRG; PAM sequence: GAG
aaatgaagagggtgtggcta

SEQ ID NO: 9687 - DNA, 20 bp, Artificial Sequence
  Description of Artificial Sequence: Synthetic oligonucleotide
  Target: ANGPTL4; (-) strand; PAM type: NRG; PAM sequence: TAG
ggaaatgaagagggtgtggc

SEQ ID NO: 9688 - DNA, 20 bp, Artificial Sequence
  Description of Artificial Sequence: Synthetic oligonucleotide
  Target: ANGPTL4; (-) strand; PAM type: NRG; PAM sequence: TGG
gcctggaaatgaagagggtg

SEQ ID NO: 9689 - DNA, 20 bp, Artificial Sequence
  Description of Artificial Sequence: Synthetic oligonucleotide
  Target: ANGPTL4; (-) strand; PAM type: NRG; PAM sequence: GGG
gcagagcctggaaatgaaga

SEQ ID NO: 9690 - DNA, 20 bp, Artificial Sequence
  Description of Artificial Sequence: Synthetic oligonucleotide
  Target: ANGPTL4; (-) strand; PAM type: NRG; PAM sequence: AGG
ggcagagcctggaaatgaag

SEQ ID NO: 9691 - DNA, 20 bp, Artificial Sequence
  Description of Artificial Sequence: Synthetic oligonucleotide
  Target: ANGPTL4; (-) strand; PAM type: NRG; PAM sequence: GAG
tggcagagcctggaaatgaa

SEQ ID NO: 9692 - DNA, 20 bp, Artificial Sequence
  Description of Artificial Sequence: Synthetic oligonucleotide
  Target: ANGPTL4; (-) strand; PAM type: NRG; PAM sequence: AAG
attggcagagcctggaaatg

SEQ ID NO: 9693 - DNA, 20 bp, Artificial Sequence
  Description of Artificial Sequence: Synthetic oligonucleotide
  Target: ANGPTL4; (-) strand; PAM type: NRG; PAM sequence: TGG
agcccatcattggcagagcc

SEQ ID NO: 9694 - DNA, 20 bp, Artificial Sequence
  Description of Artificial Sequence: Synthetic oligonucleotide
  Target: ANGPTL4; (-) strand; PAM type: NRG; PAM sequence: GAG
agatgagcccatcattggca

SEQ ID NO: 9695 - DNA, 20 bp, Artificial Sequence
  Description of Artificial Sequence: Synthetic oligonucleotide
  Target: ANGPTL4; (-) strand; PAM type: NRG; PAM sequence: CAG
agagatgagcccatcattgg

SEQ ID NO: 9696 - DNA, 20 bp, Artificial Sequence
  Description of Artificial Sequence: Synthetic oligonucleotide
  Target: ANGPTL4; (-) strand; PAM type: NRG; PAM sequence: TGG
tgaagagatgagcccatcat

SEQ ID NO: 9697 - DNA, 20 bp, Artificial Sequence
  Description of Artificial Sequence: Synthetic oligonucleotide
  Target: ANGPTL4; (-) strand; PAM type: NRG; PAM sequence: GAG
aaggatgacattgaagagat

SEQ ID NO: 9698 - DNA, 20 bp, Artificial Sequence
  Description of Artificial Sequence: Synthetic oligonucleotide
  Target: ANGPTL4; (-) strand; PAM type: NRG; PAM sequence: GAG
ggaaaaaggatgacattgaa

SEQ ID NO: 9699 - DNA, 20 bp, Artificial Sequence
  Description of Artificial Sequence: Synthetic oligonucleotide
  Target: ANGPTL4; (-) strand; PAM type: NRG; PAM sequence: AAG
caggaaaaaggatgacattg

SEQ ID NO: 9700 - DNA, 20 bp, Artificial Sequence
  Description of Artificial Sequence: Synthetic oligonucleotide
  Target: ANGPTL4; (-) strand; PAM type: NRG; PAM sequence: AGG
tcaaggtggctgcaggaaaa

SEQ ID NO: 9701 - DNA, 20 bp, Artificial Sequence
  Description of Artificial Sequence: Synthetic oligonucleotide
  Target: ANGPTL4; (-) strand; PAM type: NRG; PAM sequence: AAG
gtcaaggtggctgcaggaaa

SEQ ID NO: 9702 - DNA, 20 bp, Artificial Sequence
  Description of Artificial Sequence: Synthetic oligonucleotide
  Target: ANGPTL4; (-) strand; PAM type: NRG; PAM sequence: AGG
tttgaggtcaaggtggctgc

SEQ ID NO: 9703 - DNA, 20 bp, Artificial Sequence
  Description of Artificial Sequence: Synthetic oligonucleotide
  Target: ANGPTL4; (-) strand; PAM type: NRG; PAM sequence: CAG
ctttgaggtcaaggtggctg

SEQ ID NO: 9704 - DNA, 20 bp, Artificial Sequence
  Description of Artificial Sequence: Synthetic oligonucleotide
  Target: ANGPTL4; (-) strand; PAM type: NRG; PAM sequence: TGG
gaaatgctttgaggtcaagg

SEQ ID NO: 9705 - DNA, 20 bp, Artificial Sequence
  Description of Artificial Sequence: Synthetic oligonucleotide
  Target: ANGPTL4; (-) strand; PAM type: NRG; PAM sequence: AGG
caggaaatgctttgaggtca

SEQ ID NO: 9706 - DNA, 20 bp, Artificial Sequence
  Description of Artificial Sequence: Synthetic oligonucleotide
  Target: ANGPTL4; (-) strand; PAM type: NRG; PAM sequence: AAG
gcaggaaatgctttgaggtc

SEQ ID NO: 9707 - DNA, 20 bp, Artificial Sequence
  Description of Artificial Sequence: Synthetic oligonucleotide
  Target: ANGPTL4; (-) strand; PAM type: NRG; PAM sequence: AGG
gaggggcaggaaatgctttg

SEQ ID NO: 9708 - DNA, 20 bp, Artificial Sequence
  Description of Artificial Sequence: Synthetic oligonucleotide
  Target: ANGPTL4; (-) strand; PAM type: NRG; PAM sequence: GAG
ggaggggcaggaaatgcttt

SEQ ID NO: 9709 - DNA, 20 bp, Artificial Sequence
  Description of Artificial Sequence: Synthetic oligonucleotide
  Target: ANGPTL4; (-) strand; PAM type: NRG; PAM sequence: AGG
gttccccaggttggaggggc

SEQ ID NO: 9710 - DNA, 20 bp, Artificial Sequence
  Description of Artificial Sequence: Synthetic oligonucleotide
  Target: ANGPTL4; (-) strand; PAM type: NRG; PAM sequence: CAG
cgttccccaggttggagggg

SEQ ID NO: 9711 - DNA, 20 bp, Artificial Sequence
  Description of Artificial Sequence: Synthetic oligonucleotide
  Target: ANGPTL4; (-) strand; PAM type: NRG; PAM sequence: GGG
tgtcgttccccaggttggag

SEQ ID NO: 9712 - DNA, 20 bp, Artificial Sequence
  Description of Artificial Sequence: Synthetic oligonucleotide
  Target: ANGPTL4; (-) strand; PAM type: NRG; PAM sequence: GGG
ctgtcgttccccaggttgga

SEQ ID NO: 9713 - DNA, 20 bp, Artificial Sequence
  Description of Artificial Sequence: Synthetic oligonucleotide
  Target: ANGPTL4; (-) strand; PAM type: NRG; PAM sequence: AGG
tctgtcgttccccaggttgg

SEQ ID NO: 9714 - DNA, 20 bp, Artificial Sequence
  Description of Artificial Sequence: Synthetic oligonucleotide
  Target: ANGPTL4; (-) strand; PAM type: NRG; PAM sequence: GAG
ttctgtcgttccccaggttg

SEQ ID NO: 9715 - DNA, 20 bp, Artificial Sequence
  Description of Artificial Sequence: Synthetic oligonucleotide
  Target: ANGPTL4; (-) strand; PAM type: NRG; PAM sequence: TGG
ttttctgtcgttccccaggt

SEQ ID NO: 9716 - DNA, 20 bp, Artificial Sequence
  Description of Artificial Sequence: Synthetic oligonucleotide
  Target: ANGPTL4; (-) strand; PAM type: NRG; PAM sequence: AGG
ttttttttctgtcgttcccc

SEQ ID NO: 9717 - DNA, 20 bp, Artificial Sequence
  Description of Artificial Sequence: Synthetic oligonucleotide
  Target: ANGPTL4; (-) strand; PAM type: NRG; PAM sequence: CAG
tttttttttctgtcgttccc

SEQ ID NO: 9718 - DNA, 20 bp, Artificial Sequence
  Description of Artificial Sequence: Synthetic oligonucleotide
  Target: ANGPTL4; (-) strand; PAM type: NRG; PAM sequence: TGG
gcgccaccgtgcccaggtgg

SEQ ID NO: 9719 - DNA, 20 bp, Artificial Sequence
  Description of Artificial Sequence: Synthetic oligonucleotide
  Target: ANGPTL4; (-) strand; PAM type: NRG; PAM sequence: TGG
agtgcgccaccgtgcccagg

SEQ ID NO: 9720 - DNA, 20 bp, Artificial Sequence
  Description of Artificial Sequence: Synthetic oligonucleotide
  Target: ANGPTL4; (-) strand; PAM type: NRG; PAM sequence: AGG
aggagtgcgccaccgtgccc

SEQ ID NO: 9721 - DNA, 20 bp, Artificial Sequence
  Description of Artificial Sequence: Synthetic oligonucleotide
  Target: ANGPTL4; (-) strand; PAM type: NRG; PAM sequence: CAG
taggagtgcgccaccgtgcc

SEQ ID NO: 9722 - DNA, 20 bp, Artificial Sequence
  Description of Artificial Sequence: Synthetic oligonucleotide
  Target: ANGPTL4; (-) strand; PAM type: NRG; PAM sequence: GAG
ccagagtgcggggagtgtag

SEQ ID NO: 9723 - DNA, 20 bp, Artificial Sequence
  Description of Artificial Sequence: Synthetic oligonucleotide
  Target: ANGPTL4; (-) strand; PAM type: NRG; PAM sequence: AGG
tcccagagtgcggggagtgt

SEQ ID NO: 9724 - DNA, 20 bp, Artificial Sequence
  Description of Artificial Sequence: Synthetic oligonucleotide
  Target: ANGPTL4; (-) strand; PAM type: NRG; PAM sequence: TAG
ctcccagagtgcggggagtg

SEQ ID NO: 9725 - DNA, 20 bp, Artificial Sequence
  Description of Artificial Sequence: Synthetic oligonucleotide
  Target: ANGPTL4; (-) strand; PAM type: NRG; PAM sequence: GAG
tcagcctcccagagtgcggg

SEQ ID NO: 9726 - DNA, 20 bp, Artificial Sequence
  Description of Artificial Sequence: Synthetic oligonucleotide
  Target: ANGPTL4; (-) strand; PAM type: NRG; PAM sequence: GGG
cctcagcctcccagagtgcg

SEQ ID NO: 9727 - DNA, 20 bp, Artificial Sequence
  Description of Artificial Sequence: Synthetic oligonucleotide
  Target: ANGPTL4; (-) strand; PAM type: NRG; PAM sequence: GGG
acctcagcctcccagagtgc

SEQ ID NO: 9728 - DNA, 20 bp, Artificial Sequence
  Description of Artificial Sequence: Synthetic oligonucleotide
  Target: ANGPTL4; (-) strand; PAM type: NRG; PAM sequence: CGG
cacctcagcctcccagagtg

SEQ ID NO: 9729 - DNA, 20 bp, Artificial Sequence
  Description of Artificial Sequence: Synthetic oligonucleotide
  Target: ANGPTL4; (-) strand; PAM type: NRG; PAM sequence: GAG
ctacccacctcagcctccca

SEQ ID NO: 9730 - DNA, 20 bp, Artificial Sequence
  Description of Artificial Sequence: Synthetic oligonucleotide
  Target: ANGPTL4; (-) strand; PAM type: NRG; PAM sequence: CAG
atctacccacctcagcctcc

SEQ ID NO: 9731 - DNA, 20 bp, Artificial Sequence
  Description of Artificial Sequence: Synthetic oligonucleotide
  Target: ANGPTL4; (-) strand; PAM type: NRG; PAM sequence: CAG
accttgtgatctacccacct

SEQ ID NO: 9732 - DNA, 20 bp, Artificial Sequence
  Description of Artificial Sequence: Synthetic oligonucleotide
  Target: ANGPTL4; (-) strand; PAM type: NRG; PAM sequence: TGG
tttcaccgtgtcagccagta

SEQ ID NO: 9733 - DNA, 20 bp, Artificial Sequence
  Description of Artificial Sequence: Synthetic oligonucleotide
  Target: ANGPTL4; (-) strand; PAM type: NRG; PAM sequence: CAG
cggggtttcaccgtgtcagc

SEQ ID NO: 9734 - DNA, 20 bp, Artificial Sequence
  Description of Artificial Sequence: Synthetic oligonucleotide
  Target: ANGPTL4; (-) strand; PAM type: NRG; PAM sequence: CAG
gagacggggtttcaccgtgt

SEQ ID NO: 9735 - DNA, 20 bp, Artificial Sequence
  Description of Artificial Sequence: Synthetic oligonucleotide
  Target: ANGPTL4; (-) strand; PAM type: NRG; PAM sequence: GGG
ttgtatttttagtagagacg

SEQ ID NO: 9736 - DNA, 20 bp, Artificial Sequence
  Description of Artificial Sequence: Synthetic oligonucleotide
  Target: ANGPTL4; (-) strand; PAM type: NRG; PAM sequence: GGG
tttgtatttttagtagagac

SEQ ID NO: 9737 - DNA, 20 bp, Artificial Sequence
  Description of Artificial Sequence: Synthetic oligonucleotide
  Target: ANGPTL4; (-) strand; PAM type: NRG; PAM sequence: CGG
ttttgtatttttagtagaga

SEQ ID NO: 9738 - DNA, 20 bp, Artificial Sequence
  Description of Artificial Sequence: Synthetic oligonucleotide
  Target: ANGPTL4; (-) strand; PAM type: NRG; PAM sequence: GAG
aattttttgtatttttagta

SEQ ID NO: 9739 - DNA, 20 bp, Artificial Sequence
  Description of Artificial Sequence: Synthetic oligonucleotide
  Target: ANGPTL4; (-) strand; PAM type: NRG; PAM sequence: TAG
ctaattttttgtatttttag

SEQ ID NO: 9740 - DNA, 20 bp, Artificial Sequence
  Description of Artificial Sequence: Synthetic oligonucleotide
  Target: ANGPTL4; (-) strand; PAM type: NRG; PAM sequence: TAG
tggctaattttttgtatttt

SEQ ID NO: 9741 - DNA, 20 bp, Artificial Sequence
  Description of Artificial Sequence: Synthetic oligonucleotide
  Target: ANGPTL4; (-) strand; PAM type: NRG; PAM sequence: TGG
cgggcatgtgccaccatgcc

SEQ ID NO: 9742 - DNA, 20 bp, Artificial Sequence
  Description of Artificial Sequence: Synthetic oligonucleotide
  Target: ANGPTL4; (-) strand; PAM type: NRG; PAM sequence: GGG
tcccgaatagctgggactac

SEQ ID NO: 9743 - DNA, 20 bp, Artificial Sequence
  Description of Artificial Sequence: Synthetic oligonucleotide
  Target: ANGPTL4; (-) strand; PAM type: NRG; PAM sequence: CGG
ctcccgaatagctgggacta

SEQ ID NO: 9744 - DNA, 20 bp, Artificial Sequence
  Description of Artificial Sequence: Synthetic oligonucleotide
  Target: ANGPTL4; (-) strand; PAM type: NRG; PAM sequence: GGG
ccttagcctcccgaatagct

SEQ ID NO: 9745 - DNA, 20 bp, Artificial Sequence
  Description of Artificial Sequence: Synthetic oligonucleotide
  Target: ANGPTL4; (-) strand; PAM type: NRG; PAM sequence: TGG
gccttagcctcccgaatagc

SEQ ID NO: 9746 - DNA, 20 bp, Artificial Sequence
  Description of Artificial Sequence: Synthetic oligonucleotide
  Target: ANGPTL4; (-) strand; PAM type: NRG; PAM sequence: TAG
tcctgccttagcctcccgaa

SEQ ID NO: 9747 - DNA, 20 bp, Artificial Sequence
  Description of Artificial Sequence: Synthetic oligonucleotide
  Target: ANGPTL4; (-) strand; PAM type: NRG; PAM sequence: TAG
ttcaagtgattctcctgcct

SEQ ID NO: 9748 - DNA, 20 bp, Artificial Sequence
  Description of Artificial Sequence: Synthetic oligonucleotide
  Target: ANGPTL4; (-) strand; PAM type: NRG; PAM sequence: AAG
aacctccgcctcccaggttc

SEQ ID NO: 9749 - DNA, 20 bp, Artificial Sequence
  Description of Artificial Sequence: Synthetic oligonucleotide
  Target: ANGPTL4; (-) strand; PAM type: NRG; PAM sequence: AGG
cactgcaacctccgcctccc

SEQ ID NO: 9750 - DNA, 20 bp, Artificial Sequence
  Description of Artificial Sequence: Synthetic oligonucleotide
  Target: ANGPTL4; (-) strand; PAM type: NRG; PAM sequence: CAG
tcactgcaacctccgcctcc

SEQ ID NO: 9751 - DNA, 20 bp, Artificial Sequence
  Description of Artificial Sequence: Synthetic oligonucleotide
  Target: ANGPTL4; (-) strand; PAM type: NRG; PAM sequence: CAG
ggagtgcagtggtgcaatct

SEQ ID NO: 9752 - DNA, 20 bp, Artificial Sequence
  Description of Artificial Sequence: Synthetic oligonucleotide
  Target: ANGPTL4; (-) strand; PAM type: NRG; PAM sequence: TGG
tcacccaggctggagtgcag

SEQ ID NO: 9753 - DNA, 20 bp, Artificial Sequence
  Description of Artificial Sequence: Synthetic oligonucleotide
  Target: ANGPTL4; (-) strand; PAM type: NRG; PAM sequence: CAG
ctgtcacccaggctggagtg

SEQ ID NO: 9754 - DNA, 20 bp, Artificial Sequence
  Description of Artificial Sequence: Synthetic oligonucleotide
  Target: ANGPTL4; (-) strand; PAM type: NRG; PAM sequence: GAG
ttgctctgtcacccaggctg

SEQ ID NO: 9755 - DNA, 20 bp, Artificial Sequence
  Description of Artificial Sequence: Synthetic oligonucleotide
  Target: ANGPTL4; (-) strand; PAM type: NRG; PAM sequence: TGG
tcttgctctgtcacccaggc

SEQ ID NO: 9756 - DNA, 20 bp, Artificial Sequence
  Description of Artificial Sequence: Synthetic oligonucleotide
  Target: ANGPTL4; (-) strand; PAM type: NRG; PAM sequence: AGG
agagtcttgctctgtcaccc

SEQ ID NO: 9757 - DNA, 20 bp, Artificial Sequence
  Description of Artificial Sequence: Synthetic oligonucleotide
  Target: ANGPTL4; (-) strand; PAM type: NRG; PAM sequence: CAG
cagagtcttgctctgtcacc

SEQ ID NO: 9758 - DNA, 20 bp, Artificial Sequence
  Description of Artificial Sequence: Synthetic oligonucleotide
  Target: ANGPTL4; (-) strand; PAM type: NRG; PAM sequence: GAG
tttctttcttttttgagaca

SEQ ID NO: 9759 - DNA, 20 bp, Artificial Sequence
  Description of Artificial Sequence: Synthetic oligonucleotide
  Target: ANGPTL4; (-) strand; PAM type: NRG; PAM sequence: CAG
tttttctttcttttttgaga

SEQ ID NO: 9760 - DNA, 20 bp, Artificial Sequence
  Description of Artificial Sequence: Synthetic oligonucleotide
  Target: ANGPTL4; (-) strand; PAM type: NRG; PAM sequence: GAG
tctttttttctttctttttt

SEQ ID NO: 9761 - DNA, 20 bp, Artificial Sequence
  Description of Artificial Sequence: Synthetic oligonucleotide
  Target: ANGPTL4; (-) strand; PAM type: NRG; PAM sequence: TGG
cccttgttagtttcctgcca

SEQ ID NO: 9762 - DNA, 20 bp, Artificial Sequence
  Description of Artificial Sequence: Synthetic oligonucleotide
  Target: ANGPTL4; (-) strand; PAM type: NRG; PAM sequence: TAG
ccagcttcctggccccttgt

SEQ ID NO: 9763 - DNA, 20 bp, Artificial Sequence
  Description of Artificial Sequence: Synthetic oligonucleotide
  Target: ANGPTL4; (-) strand; PAM type: NRG; PAM sequence: TGG
aggttcacatcccagcttcc

SEQ ID NO: 9764 - DNA, 20 bp, Artificial Sequence
  Description of Artificial Sequence: Synthetic oligonucleotide
  Target: ANGPTL4; (-) strand; PAM type: NRG; PAM sequence: CAG
acaggtccaggttcacatcc

SEQ ID NO: 9765 - DNA, 20 bp, Artificial Sequence
  Description of Artificial Sequence: Synthetic oligonucleotide
  Target: ANGPTL4; (-) strand; PAM type: NRG; PAM sequence: AGG
ctctggagtttaacaggtcc

SEQ ID NO: 9766 - DNA, 20 bp, Artificial Sequence
  Description of Artificial Sequence: Synthetic oligonucleotide
  Target: ANGPTL4; (-) strand; PAM type: NRG; PAM sequence: CAG
gctctggagtttaacaggtc

SEQ ID NO: 9767 - DNA, 20 bp, Artificial Sequence
  Description of Artificial Sequence: Synthetic oligonucleotide
  Target: ANGPTL4; (-) strand; PAM type: NRG; PAM sequence: AGG
ctgcagctctggagtttaac

SEQ ID NO: 9768 - DNA, 20 bp, Artificial Sequence
  Description of Artificial Sequence: Synthetic oligonucleotide
  Target: ANGPTL4; (-) strand; PAM type: NRG; PAM sequence: CAG
gctgcagctctggagtttaa

SEQ ID NO: 9769 - DNA, 20 bp, Artificial Sequence
  Description of Artificial Sequence: Synthetic oligonucleotide
  Target: ANGPTL4; (-) strand; PAM type: NRG; PAM sequence: GAG
gatttacagctgcagctctg

SEQ ID NO: 9770 - DNA, 20 bp, Artificial Sequence
  Description of Artificial Sequence: Synthetic oligonucleotide
  Target: ANGPTL4; (-) strand; PAM type: NRG; PAM sequence: TGG
gtgatttacagctgcagctc

SEQ ID NO: 9771 - DNA, 20 bp, Artificial Sequence
  Description of Artificial Sequence: Synthetic oligonucleotide
  Target: ANGPTL4; (-) strand; PAM type: NRG; PAM sequence: CAG
agggatgtgatttacagctg

SEQ ID NO: 9772 - DNA, 20 bp, Artificial Sequence
  Description of Artificial Sequence: Synthetic oligonucleotide
  Target: ANGPTL4; (-) strand; PAM type: NRG; PAM sequence: CAG
caggagagggatgtgattta

SEQ ID NO: 9773 - DNA, 20 bp, Artificial Sequence
  Description of Artificial Sequence: Synthetic oligonucleotide
  Target: ANGPTL4; (-) strand; PAM type: NRG; PAM sequence: GGG
agctcctgtggtccaggaga

SEQ ID NO: 9774 - DNA, 20 bp, Artificial Sequence
  Description of Artificial Sequence: Synthetic oligonucleotide
  Target: ANGPTL4; (-) strand; PAM type: NRG; PAM sequence: AGG
gagctcctgtggtccaggag

SEQ ID NO: 9775 - DNA, 20 bp, Artificial Sequence
  Description of Artificial Sequence: Synthetic oligonucleotide
  Target: ANGPTL4; (-) strand; PAM type: NRG; PAM sequence: GAG
tgagctcctgtggtccagga

SEQ ID NO: 9776 - DNA, 20 bp, Artificial Sequence
  Description of Artificial Sequence: Synthetic oligonucleotide
  Target: ANGPTL4; (-) strand; PAM type: NRG; PAM sequence: GAG
agtgagctcctgtggtccag

SEQ ID NO: 9777 - DNA, 20 bp, Artificial Sequence
  Description of Artificial Sequence: Synthetic oligonucleotide
  Target: ANGPTL4; (-) strand; PAM type: NRG; PAM sequence: AGG
ccagtgagctcctgtggtcc

SEQ ID NO: 9778 - DNA, 20 bp, Artificial Sequence
  Description of Artificial Sequence: Synthetic oligonucleotide
  Target: ANGPTL4; (-) strand; PAM type: NRG; PAM sequence: CAG
gccagtgagctcctgtggtc

SEQ ID NO: 9779 - DNA, 20 bp, Artificial Sequence
  Description of Artificial Sequence: Synthetic oligonucleotide
  Target: ANGPTL4; (-) strand; PAM type: NRG; PAM sequence: TGG
ctggggccagtgagctcctg

SEQ ID NO: 9780 - DNA, 20 bp, Artificial Sequence
  Description of Artificial Sequence: Synthetic oligonucleotide
  Target: ANGPTL4; (-) strand; PAM type: NRG; PAM sequence: GAG
atgcaggaactggggccagt

SEQ ID NO: 9781 - DNA, 20 bp, Artificial Sequence
  Description of Artificial Sequence: Synthetic oligonucleotide
  Target: ANGPTL4; (-) strand; PAM type: NRG; PAM sequence: CAG
ccaaatgcaggaactggggc

SEQ ID NO: 9782 - DNA, 20 bp, Artificial Sequence
  Description of Artificial Sequence: Synthetic oligonucleotide
  Target: ANGPTL4; (-) strand; PAM type: NRG; PAM sequence: GGG
ttttccaaatgcaggaactg

SEQ ID NO: 9783 - DNA, 20 bp, Artificial Sequence
  Description of Artificial Sequence: Synthetic oligonucleotide
  Target: ANGPTL4; (-) strand; PAM type: NRG; PAM sequence: GGG
attttccaaatgcaggaact

SEQ ID NO: 9784 - DNA, 20 bp, Artificial Sequence
  Description of Artificial Sequence: Synthetic oligonucleotide
  Target: ANGPTL4; (-) strand; PAM type: NRG; PAM sequence: TGG
cattttccaaatgcaggaac

SEQ ID NO: 9785 - DNA, 20 bp, Artificial Sequence
  Description of Artificial Sequence: Synthetic oligonucleotide
  Target: ANGPTL4; (-) strand; PAM type: NRG; PAM sequence: AGG
catccccattttccaaatgc

SEQ ID NO: 9786 - DNA, 20 bp, Artificial Sequence
  Description of Artificial Sequence: Synthetic oligonucleotide
  Target: ANGPTL4; (-) strand; PAM type: NRG; PAM sequence: CAG
ccatccccattttccaaatg

SEQ ID NO: 9787 - DNA, 20 bp, Artificial Sequence
  Description of Artificial Sequence: Synthetic oligonucleotide
  Target: ANGPTL4; (-) strand; PAM type: NRG; PAM sequence: GGG
gatggtggcatggaggggtg

SEQ ID NO: 9788 - DNA, 20 bp, Artificial Sequence
  Description of Artificial Sequence: Synthetic oligonucleotide
  Target: ANGPTL4; (-) strand; PAM type: NRG; PAM sequence: GGG
ggatggtggcatggaggggt

SEQ ID NO: 9789 - DNA, 20 bp, Artificial Sequence
  Description of Artificial Sequence: Synthetic oligonucleotide
  Target: ANGPTL4; (-) strand; PAM type: NRG; PAM sequence: TGG
gggatggtggcatggagggg

SEQ ID NO: 9790 - DNA, 20 bp, Artificial Sequence
  Description of Artificial Sequence: Synthetic oligonucleotide
  Target: ANGPTL4; (-) strand; PAM type: NRG; PAM sequence: GGG
gaagggatggtggcatggag

SEQ ID NO: 9791 - DNA, 20 bp, Artificial Sequence
  Description of Artificial Sequence: Synthetic oligonucleotide
  Target: ANGPTL4; (-) strand; PAM type: NRG; PAM sequence: GGG
ggaagggatggtggcatgga

SEQ ID NO: 9792 - DNA, 20 bp, Artificial Sequence
  Description of Artificial Sequence: Synthetic oligonucleotide
  Target: ANGPTL4; (-) strand; PAM type: NRG; PAM sequence: AGG
aggaagggatggtggcatgg

SEQ ID NO: 9793 - DNA, 20 bp, Artificial Sequence
  Description of Artificial Sequence: Synthetic oligonucleotide
  Target: ANGPTL4; (-) strand; PAM type: NRG; PAM sequence: GAG
caggaagggatggtggcatg

SEQ ID NO: 9794 - DNA, 20 bp, Artificial Sequence
  Description of Artificial Sequence: Synthetic oligonucleotide
  Target: ANGPTL4; (-) strand; PAM type: NRG; PAM sequence: TGG
gccaggaagggatggtggca

SEQ ID NO: 9795 - DNA, 20 bp, Artificial Sequence
  Description of Artificial Sequence: Synthetic oligonucleotide
  Target: ANGPTL4; (-) strand; PAM type: NRG; PAM sequence: TGG
atgaggccaggaagggatgg

SEQ ID NO: 9796 - DNA, 20 bp, Artificial Sequence
  Description of Artificial Sequence: Synthetic oligonucleotide
  Target: ANGPTL4; (-) strand; PAM type: NRG; PAM sequence: TGG
accatgaggccaggaaggga

SEQ ID NO: 9797 - DNA, 20 bp, Artificial Sequence
  Description of Artificial Sequence: Synthetic oligonucleotide
  Target: ANGPTL4; (-) strand; PAM type: NRG; PAM sequence: GGG
ccacaccatgaggccaggaa

SEQ ID NO: 9798 - DNA, 20 bp, Artificial Sequence
  Description of Artificial Sequence: Synthetic oligonucleotide
  Target: ANGPTL4; (-) strand; PAM type: NRG; PAM sequence: AGG
cccacaccatgaggccagga

SEQ ID NO: 9799 - DNA, 20 bp, Artificial Sequence
  Description of Artificial Sequence: Synthetic oligonucleotide
  Target: ANGPTL4; (-) strand; PAM type: NRG; PAM sequence: AAG
ccccacaccatgaggccagg

SEQ ID NO: 9800 - DNA, 20 bp, Artificial Sequence
  Description of Artificial Sequence: Synthetic oligonucleotide
  Target: ANGPTL4; (-) strand; PAM type: NRG; PAM sequence: AGG
cctccccacaccatgaggcc

SEQ ID NO: 9801 - DNA, 20 bp, Artificial Sequence
  Description of Artificial Sequence: Synthetic oligonucleotide
  Target: ANGPTL4; (-) strand; PAM type: NRG; PAM sequence: CAG
ccctccccacaccatgaggc

SEQ ID NO: 9802 - DNA, 20 bp, Artificial Sequence
  Description of Artificial Sequence: Synthetic oligonucleotide
  Target: ANGPTL4; (-) strand; PAM type: NRG; PAM sequence: AGG
caccccctccccacaccatg

SEQ ID NO: 9803 - DNA, 20 bp, Artificial Sequence
  Description of Artificial Sequence: Synthetic oligonucleotide
  Target: ANGPTL4; (-) strand; PAM type: NRG; PAM sequence: GAG
ccaccccctccccacaccat

SEQ ID NO: 9804 - DNA, 20 bp, Artificial Sequence
  Description of Artificial Sequence: Synthetic oligonucleotide
  Target: ANGPTL4; (-) strand; PAM type: NRG; PAM sequence: CAG
cagtcgcgaggcactggacc

SEQ ID NO: 9805 - DNA, 20 bp, Artificial Sequence
  Description of Artificial Sequence: Synthetic oligonucleotide
  Target: ANGPTL4; (-) strand; PAM type: NRG; PAM sequence: TGG
ggattacagtcgcgaggcac

SEQ ID NO: 9806 - DNA, 20 bp, Artificial Sequence
  Description of Artificial Sequence: Synthetic oligonucleotide
  Target: ANGPTL4; (-) strand; PAM type: NRG; PAM sequence: AGG
gagctgggattacagtcgcg

SEQ ID NO: 9807 - DNA, 20 bp, Artificial Sequence
  Description of Artificial Sequence: Synthetic oligonucleotide
  Target: ANGPTL4; (-) strand; PAM type: NRG; PAM sequence: GAG
agagctgggattacagtcgc

SEQ ID NO: 9808 - DNA, 20 bp, Artificial Sequence
  Description of Artificial Sequence: Synthetic oligonucleotide
  Target: ANGPTL4; (-) strand; PAM type: NRG; PAM sequence: CAG
ctcccaaagagctgggatta

SEQ ID NO: 9809 - DNA, 20 bp, Artificial Sequence
  Description of Artificial Sequence: Synthetic oligonucleotide
  Target: ANGPTL4; (-) strand; PAM type: NRG; PAM sequence: GGG
cctcagcctcccaaagagct

SEQ ID NO: 9810 - DNA, 20 bp, Artificial Sequence
  Description of Artificial Sequence: Synthetic oligonucleotide
  Target: ANGPTL4; (-) strand; PAM type: NRG; PAM sequence: TGG
gcctcagcctcccaaagagc

SEQ ID NO: 9811 - DNA, 20 bp, Artificial Sequence
  Description of Artificial Sequence: Synthetic oligonucleotide
  Target: ANGPTL4; (-) strand; PAM type: NRG; PAM sequence: GAG
tccagcctcagcctcccaaa

SEQ ID NO: 9812 - DNA, 20 bp, Artificial Sequence
  Description of Artificial Sequence: Synthetic oligonucleotide
  Target: ANGPTL4; (-) strand; PAM type: NRG; PAM sequence: AAG
cctccagcctcagcctccca

SEQ ID NO: 9813 - DNA, 20 bp, Artificial Sequence
  Description of Artificial Sequence: Synthetic oligonucleotide
  Target: ANGPTL4; (-) strand; PAM type: NRG; PAM sequence: CAG
actccaaggtcctccagcct

SEQ ID NO: 9814 - DNA, 20 bp, Artificial Sequence
  Description of Artificial Sequence: Synthetic oligonucleotide
  Target: ANGPTL4; (-) strand; PAM type: NRG; PAM sequence: CAG
tctcaaactccaaggtcctc

SEQ ID NO: 9815 - DNA, 20 bp, Artificial Sequence
  Description of Artificial Sequence: Synthetic oligonucleotide
  Target: ANGPTL4; (-) strand; PAM type: NRG; PAM sequence: AGG
taggctggtctcaaactcca

SEQ ID NO: 9816 - DNA, 20 bp, Artificial Sequence
  Description of Artificial Sequence: Synthetic oligonucleotide
  Target: ANGPTL4; (-) strand; PAM type: NRG; PAM sequence: AAG
gtaggctggtctcaaactcc

SEQ ID NO: 9817 - DNA, 20 bp, Artificial Sequence
  Description of Artificial Sequence: Synthetic oligonucleotide
  Target: ANGPTL4; (-) strand; PAM type: NRG; PAM sequence: TGG
tcttgctgtgttgcgtaggc

SEQ ID NO: 9818 - DNA, 20 bp, Artificial Sequence
  Description of Artificial Sequence: Synthetic oligonucleotide
  Target: ANGPTL4; (-) strand; PAM type: NRG; PAM sequence: AGG
gaggtcttgctgtgttgcgt

SEQ ID NO: 9819 - DNA, 20 bp, Artificial Sequence
  Description of Artificial Sequence: Synthetic oligonucleotide
  Target: ANGPTL4; (-) strand; PAM type: NRG; PAM sequence: TAG
tgaggtcttgctgtgttgcg

SEQ ID NO: 9820 - DNA, 20 bp, Artificial Sequence
  Description of Artificial Sequence: Synthetic oligonucleotide
  Target: ANGPTL4; (-) strand; PAM type: NRG; PAM sequence: AGG
aaaaatttatcgtagagatg

SEQ ID NO: 9821 - DNA, 20 bp, Artificial Sequence
  Description of Artificial Sequence: Synthetic oligonucleotide
  Target: ANGPTL4; (-) strand; PAM type: NRG; PAM sequence: GAG
taaaaatttatcgtagagat

SEQ ID NO: 9822 - DNA, 20 bp, Artificial Sequence
  Description of Artificial Sequence: Synthetic oligonucleotide
  Target: ANGPTL4; (-) strand; PAM type: NRG; PAM sequence: GAG
ctttttaaaaatttatcgta

SEQ ID NO: 9823 - DNA, 20 bp, Artificial Sequence
  Description of Artificial Sequence: Synthetic oligonucleotide
  Target: ANGPTL4; (-) strand; PAM type: NRG; PAM sequence: TAG
gactttttaaaaatttatcg

SEQ ID NO: 9824 - DNA, 20 bp, Artificial Sequence
  Description of Artificial Sequence: Synthetic oligonucleotide
  Target: ANGPTL4; (-) strand; PAM type: NRG; PAM sequence: CGG
taggcatgagccactgcacc

SEQ ID NO: 9825 - DNA, 20 bp, Artificial Sequence
  Description of Artificial Sequence: Synthetic oligonucleotide
  Target: ANGPTL4; (-) strand; PAM type: NRG; PAM sequence: GAG
agtgctgggattataggcat

SEQ ID NO: 9826 - DNA, 20 bp, Artificial Sequence
  Description of Artificial Sequence: Synthetic oligonucleotide
  Target: ANGPTL4; (-) strand; PAM type: NRG; PAM sequence: AGG
tcccaaagtgctgggattat

SEQ ID NO: 9827 - DNA, 20 bp, Artificial Sequence
  Description of Artificial Sequence: Synthetic oligonucleotide
  Target: ANGPTL4; (-) strand; PAM type: NRG; PAM sequence: TAG
ctcccaaagtgctgggatta

SEQ ID NO: 9828 - DNA, 20 bp, Artificial Sequence
  Description of Artificial Sequence: Synthetic oligonucleotide
  Target: ANGPTL4; (-) strand; PAM type: NRG; PAM sequence: GGG
ccttggcctcccaaagtgct

SEQ ID NO: 9829 - DNA, 20 bp, Artificial Sequence
  Description of Artificial Sequence: Synthetic oligonucleotide
  Target: ANGPTL4; (-) strand; PAM type: NRG; PAM sequence: TGG
gccttggcctcccaaagtgc

SEQ ID NO: 9830 - DNA, 20 bp, Artificial Sequence
  Description of Artificial Sequence: Synthetic oligonucleotide
  Target: ANGPTL4; (-) strand; PAM type: NRG; PAM sequence: AAG
ccacccgccttggcctccca

SEQ ID NO: 9831 - DNA, 20 bp, Artificial Sequence
  Description of Artificial Sequence: Synthetic oligonucleotide
  Target: ANGPTL4; (-) strand; PAM type: NRG; PAM sequence: TGG
acctcatgatccacccgcct

SEQ ID NO: 9832 - DNA, 20 bp, Artificial Sequence
  Description of Artificial Sequence: Synthetic oligonucleotide
  Target: ANGPTL4; (-) strand; PAM type: NRG; PAM sequence: TGG
tttcactatcttggccaggc

SEQ ID NO: 9833 - DNA, 20 bp, Artificial Sequence
  Description of Artificial Sequence: Synthetic oligonucleotide
  Target: ANGPTL4; (-) strand; PAM type: NRG; PAM sequence: AGG
ggggtttcactatcttggcc

SEQ ID NO: 9834 - DNA, 20 bp, Artificial Sequence
  Description of Artificial Sequence: Synthetic oligonucleotide
  Target: ANGPTL4; (-) strand; PAM type: NRG; PAM sequence: CAG
tggggtttcactatcttggc

SEQ ID NO: 9835 - DNA, 20 bp, Artificial Sequence
  Description of Artificial Sequence: Synthetic oligonucleotide
  Target: ANGPTL4; (-) strand; PAM type: NRG; PAM sequence: TGG
gagatggggtttcactatct

SEQ ID NO: 9836 - DNA, 20 bp, Artificial Sequence
  Description of Artificial Sequence: Synthetic oligonucleotide
  Target: ANGPTL4; (-) strand; PAM type: NRG; PAM sequence: GGG
ttgtatttttagtagagatg

SEQ ID NO: 9837 - DNA, 20 bp, Artificial Sequence
  Description of Artificial Sequence: Synthetic oligonucleotide
  Target: ANGPTL4; (-) strand; PAM type: NRG; PAM sequence: GGG
tttgtatttttagtagagat

SEQ ID NO: 9838 - DNA, 20 bp, Artificial Sequence
  Description of Artificial Sequence: Synthetic oligonucleotide
  Target: ANGPTL4; (-) strand; PAM type: NRG; PAM sequence: TGG
ttttgtatttttagtagaga

SEQ ID NO: 9839 - DNA, 20 bp, Artificial Sequence
  Description of Artificial Sequence: Synthetic oligonucleotide
  Target: ANGPTL4; (-) strand; PAM type: NRG; PAM sequence: GAG
atttttttgtatttttagta

SEQ ID NO: 9840 - DNA, 20 bp, Artificial Sequence
  Description of Artificial Sequence: Synthetic oligonucleotide
  Target: ANGPTL4; (-) strand; PAM type: NRG; PAM sequence: TAG
taatttttttgtatttttag

SEQ ID NO: 9841 - DNA, 20 bp, Artificial Sequence
  Description of Artificial Sequence: Synthetic oligonucleotide
  Target: ANGPTL4; (-) strand; PAM type: NRG; PAM sequence: TAG
ggctaatttttttgtatttt

SEQ ID NO: 9842 - DNA, 20 bp, Artificial Sequence
  Description of Artificial Sequence: Synthetic oligonucleotide
  Target: ANGPTL4; (-) strand; PAM type: NRG; PAM sequence: TGG
caggcgcccaccaccacacc

SEQ ID NO: 9843 - DNA, 20 bp, Artificial Sequence
  Description of Artificial Sequence: Synthetic oligonucleotide
  Target: ANGPTL4; (-) strand; PAM type: NRG; PAM sequence: AGG
tctcaagtagctgggattac

SEQ ID NO: 9844 - DNA, 20 bp, Artificial Sequence
  Description of Artificial Sequence: Synthetic oligonucleotide
  Target: ANGPTL4; (-) strand; PAM type: NRG; PAM sequence: CAG
ctctcaagtagctgggatta

SEQ ID NO: 9845 - DNA, 20 bp, Artificial Sequence
  Description of Artificial Sequence: Synthetic oligonucleotide
  Target: ANGPTL4; (-) strand; PAM type: NRG; PAM sequence: GGG
ccttagcctctcaagtagct

SEQ ID NO: 9846 - DNA, 20 bp, Artificial Sequence
  Description of Artificial Sequence: Synthetic oligonucleotide
  Target: ANGPTL4; (-) strand; PAM type: NRG; PAM sequence: TGG
gccttagcctctcaagtagc

SEQ ID NO: 9847 - DNA, 20 bp, Artificial Sequence
  Description of Artificial Sequence: Synthetic oligonucleotide
  Target: ANGPTL4; (-) strand; PAM type: NRG; PAM sequence: TAG
ctctgccttagcctctcaag

SEQ ID NO: 9848 - DNA, 20 bp, Artificial Sequence
  Description of Artificial Sequence: Synthetic oligonucleotide
  Target: ANGPTL4; (-) strand; PAM type: NRG; PAM sequence: AAG
attctctgccttagcctctc

SEQ ID NO: 9849 - DNA, 20 bp, Artificial Sequence
  Description of Artificial Sequence: Synthetic oligonucleotide
  Target: ANGPTL4; (-) strand; PAM type: NRG; PAM sequence: TAG
gtccaagcaattctctgcct

SEQ ID NO: 9850 - DNA, 20 bp, Artificial Sequence
  Description of Artificial Sequence: Synthetic oligonucleotide
  Target: ANGPTL4; (-) strand; PAM type: NRG; PAM sequence: AAG
accctctgcctcccgagtcc

SEQ ID NO: 9851 - DNA, 20 bp, Artificial Sequence
  Description of Artificial Sequence: Synthetic oligonucleotide
  Target: ANGPTL4; (-) strand; PAM type: NRG; PAM sequence: GAG
cactgcaccctctgcctccc

SEQ ID NO: 9852 - DNA, 20 bp, Artificial Sequence
  Description of Artificial Sequence: Synthetic oligonucleotide
  Target: ANGPTL4; (-) strand; PAM type: NRG; PAM sequence: CGG
ggagtgcagtggcatgatct

SEQ ID NO: 9853 - DNA, 20 bp, Artificial Sequence
  Description of Artificial Sequence: Synthetic oligonucleotide
  Target: ANGPTL4; (-) strand; PAM type: NRG; PAM sequence: TGG
ttgcccaggctggagtgcag

SEQ ID NO: 9854 - DNA, 20 bp, Artificial Sequence
  Description of Artificial Sequence: Synthetic oligonucleotide
  Target: ANGPTL4; (-) strand; PAM type: NRG; PAM sequence: CAG
ctgttgcccaggctggagtg

SEQ ID NO: 9855 - DNA, 20 bp, Artificial Sequence
  Description of Artificial Sequence: Synthetic oligonucleotide
  Target: ANGPTL4; (-) strand; PAM type: NRG; PAM sequence: GAG
tcactctgttgcccaggctg

SEQ ID NO: 9856 - DNA, 20 bp, Artificial Sequence
  Description of Artificial Sequence: Synthetic oligonucleotide
  Target: ANGPTL4; (-) strand; PAM type: NRG; PAM sequence: TGG
tctcactctgttgcccaggc

SEQ ID NO: 9857 - DNA, 20 bp, Artificial Sequence
  Description of Artificial Sequence: Synthetic oligonucleotide
  Target: ANGPTL4; (-) strand; PAM type: NRG; PAM sequence: AGG
agggtctcactctgttgccc

SEQ ID NO: 9858 - DNA, 20 bp, Artificial Sequence
  Description of Artificial Sequence: Synthetic oligonucleotide
  Target: ANGPTL4; (-) strand; PAM type: NRG; PAM sequence: CAG
cagggtctcactctgttgcc

SEQ ID NO: 9859 - DNA, 20 bp, Artificial Sequence
  Description of Artificial Sequence: Synthetic oligonucleotide
  Target: ANGPTL4; (-) strand; PAM type: NRG; PAM sequence: GGG
ttttttttttttttgaggca

SEQ ID NO: 9860 - DNA, 20 bp, Artificial Sequence
  Description of Artificial Sequence: Synthetic oligonucleotide
  Target: ANGPTL4; (-) strand; PAM type: NRG; PAM sequence: AGG
tttttttttttttttgaggc

SEQ ID NO: 9861 - DNA, 20 bp, Artificial Sequence
  Description of Artificial Sequence: Synthetic oligonucleotide
  Target: ANGPTL4; (-) strand; PAM type: NRG; PAM sequence: CAG
ctttttttttttttttgagg

SEQ ID NO: 9862 - DNA, 20 bp, Artificial Sequence
  Description of Artificial Sequence: Synthetic oligonucleotide
  Target: ANGPTL4; (-) strand; PAM type: NRG; PAM sequence: AGG
attctttttttttttttttg

SEQ ID NO: 9863 - DNA, 20 bp, Artificial Sequence
  Description of Artificial Sequence: Synthetic oligonucleotide
  Target: ANGPTL4; (-) strand; PAM type: NRG; PAM sequence: GAG
gattcttttttttttttttt

SEQ ID NO: 9864 - DNA, 20 bp, Artificial Sequence
  Description of Artificial Sequence: Synthetic oligonucleotide
  Target: ANGPTL4; (-) strand; PAM type: NRG; PAM sequence: CAG
ctccctccctctatcatcct

SEQ ID NO: 9865 - DNA, 20 bp, Artificial Sequence
  Description of Artificial Sequence: Synthetic oligonucleotide
  Target: ANGPTL4; (-) strand; PAM type: NRG; PAM sequence: TGG
cccatcaaacccagaggaca

SEQ ID NO: 9866 - DNA, 20 bp, Artificial Sequence
  Description of Artificial Sequence: Synthetic oligonucleotide
  Target: ANGPTL4; (-) strand; PAM type: NRG; PAM sequence: AGG
ctccctcccatcaaacccag

SEQ ID NO: 9867 - DNA, 20 bp, Artificial Sequence
  Description of Artificial Sequence: Synthetic oligonucleotide
  Target: ANGPTL4; (-) strand; PAM type: NRG; PAM sequence: GAG
cctccctcccatcaaaccca

SEQ ID NO: 9868 - DNA, 20 bp, Artificial Sequence
  Description of Artificial Sequence: Synthetic oligonucleotide
  Target: ANGPTL4; (-) strand; PAM type: NRG; PAM sequence: CAG
tccctccctcccatcaaacc

SEQ ID NO: 9869 - DNA, 20 bp, Artificial Sequence
  Description of Artificial Sequence: Synthetic oligonucleotide
  Target: ANGPTL4; (-) strand; PAM type: NRG; PAM sequence: CGG
acccgacccagaagcctagc

SEQ ID NO: 9870 - DNA, 20 bp, Artificial Sequence
  Description of Artificial Sequence: Synthetic oligonucleotide
  Target: ANGPTL4; (-) strand; PAM type: NRG; PAM sequence: TAG
ccccacccgacccagaagcc

SEQ ID NO: 9871 - DNA, 20 bp, Artificial Sequence
  Description of Artificial Sequence: Synthetic oligonucleotide
  Target: ANGPTL4; (-) strand; PAM type: NRG; PAM sequence: AAG
caagtccccacccgacccag

SEQ ID NO: 9872 - DNA, 20 bp, Artificial Sequence
  Description of Artificial Sequence: Synthetic oligonucleotide
  Target: ANGPTL4; (-) strand; PAM type: NRG; PAM sequence: CAG
gttcaagtccccacccgacc

SEQ ID NO: 9873 - DNA, 20 bp, Artificial Sequence
  Description of Artificial Sequence: Synthetic oligonucleotide
  Target: ANGPTL4; (-) strand; PAM type: NRG; PAM sequence: AAG
ttagctagacagaaaagttc

SEQ ID NO: 9874 - DNA, 20 bp, Artificial Sequence
  Description of Artificial Sequence: Synthetic oligonucleotide
  Target: ANGPTL4; (-) strand; PAM type: NRG; PAM sequence: AAG
aatcctttagctagacagaa

SEQ ID NO: 9875 - DNA, 20 bp, Artificial Sequence
  Description of Artificial Sequence: Synthetic oligonucleotide
  Target: ANGPTL4; (-) strand; PAM type: NRG; PAM sequence: CAG
tttacaatcctttagctaga

SEQ ID NO: 9876 - DNA, 20 bp, Artificial Sequence
  Description of Artificial Sequence: Synthetic oligonucleotide
  Target: ANGPTL4; (-) strand; PAM type: NRG; PAM sequence: TAG
tacgtttacaatcctttagc

SEQ ID NO: 9877 - DNA, 20 bp, Artificial Sequence
  Description of Artificial Sequence: Synthetic oligonucleotide
  Target: ANGPTL4; (-) strand; PAM type: NRG; PAM sequence: TAG
ttggtacgtttacaatcctt

SEQ ID NO: 9878 - DNA, 20 bp, Artificial Sequence
  Description of Artificial Sequence: Synthetic oligonucleotide
  Target: ANGPTL4; (-) strand; PAM type: NRG; PAM sequence: TGG
gctagacacagagtgctgat

SEQ ID NO: 9879 - DNA, 20 bp, Artificial Sequence
  Description of Artificial Sequence: Synthetic oligonucleotide
  Target: ANGPTL4; (-) strand; PAM type: NRG; PAM sequence: GAG
caatcctttagctagacaca

SEQ ID NO: 9880 - DNA, 20 bp, Artificial Sequence
  Description of Artificial Sequence: Synthetic oligonucleotide
  Target: ANGPTL4; (-) strand; PAM type: NRG; PAM sequence: CAG
tacaatcctttagctagaca

SEQ ID NO: 9881 - DNA, 20 bp, Artificial Sequence
  Description of Artificial Sequence: Synthetic oligonucleotide
  Target: ANGPTL4; (-) strand; PAM type: NRG; PAM sequence: TAG
tgcatttacaatcctttagc

SEQ ID NO: 9882 - DNA, 20 bp, Artificial Sequence
  Description of Artificial Sequence: Synthetic oligonucleotide
  Target: ANGPTL4; (-) strand; PAM type: NRG; PAM sequence: TAG
ttggtgcatttacaatcctt

SEQ ID NO: 9883 - DNA, 20 bp, Artificial Sequence
  Description of Artificial Sequence: Synthetic oligonucleotide
  Target: ANGPTL4; (-) strand; PAM type: NRG; PAM sequence: TGG
gctagacacagagtgctgat

SEQ ID NO: 9884 - DNA, 20 bp, Artificial Sequence
  Description of Artificial Sequence: Synthetic oligonucleotide
  Target: ANGPTL4; (-) strand; PAM type: NRG; PAM sequence: GAG
caaacctttagctagacaca

SEQ ID NO: 9885 - DNA, 20 bp, Artificial Sequence
  Description of Artificial Sequence: Synthetic oligonucleotide
  Target: ANGPTL4; (-) strand; PAM type: NRG; PAM sequence: CAG
tacaaacctttagctagaca

SEQ ID NO: 9886 - DNA, 20 bp, Artificial Sequence
  Description of Artificial Sequence: Synthetic oligonucleotide
  Target: ANGPTL4; (-) strand; PAM type: NRG; PAM sequence: TAG
tgcatttacaaacctttagc

SEQ ID NO: 9887 - DNA, 20 bp, Artificial Sequence
  Description of Artificial Sequence: Synthetic oligonucleotide
  Target: ANGPTL4; (-) strand; PAM type: NRG; PAM sequence: TAG
ttggtgcatttacaaacctt

SEQ ID NO: 9888 - DNA, 20 bp, Artificial Sequence
  Description of Artificial Sequence: Synthetic oligonucleotide
  Target: ANGPTL4; (-) strand; PAM type: NRG; PAM sequence: TGG
gctagacacagagcgctgat

SEQ ID NO: 9889 - DNA, 20 bp, Artificial Sequence
  Description of Artificial Sequence: Synthetic oligonucleotide
  Target: ANGPTL4; (-) strand; PAM type: NRG; PAM sequence: GAG
tacctgattagctagacaca

SEQ ID NO: 9890 - DNA, 20 bp, Artificial Sequence
  Description of Artificial Sequence: Synthetic oligonucleotide
  Target: ANGPTL4; (-) strand; PAM type: NRG; PAM sequence: CAG
cctacctgattagctagaca

SEQ ID NO: 9891 - DNA, 20 bp, Artificial Sequence
  Description of Artificial Sequence: Synthetic oligonucleotide
  Target: ANGPTL4; (-) strand; PAM type: NRG; PAM sequence: TAG
aagtcccctacctgattagc

SEQ ID NO: 9892 - DNA, 20 bp, Artificial Sequence
  Description of Artificial Sequence: Synthetic oligonucleotide
  Target: ANGPTL4; (-) strand; PAM type: NRG; PAM sequence: TAG
ctccaagtcccctacctgat

SEQ ID NO: 9893 - DNA, 20 bp, Artificial Sequence
  Description of Artificial Sequence: Synthetic oligonucleotide
  Target: ANGPTL4; (+) strand; PAM type: NRG; PAM sequence: AAG
agagtcttgctctgtcaccc

SEQ ID NO: 9894 - DNA, 20 bp, Artificial Sequence
  Description of Artificial Sequence: Synthetic oligonucleotide
  Target: ANGPTL4; (+) strand; PAM type: NRG; PAM sequence: TGG
tcttgctctgtcacccaagc

SEQ ID NO: 9895 - DNA, 20 bp, Artificial Sequence
  Description of Artificial Sequence: Synthetic oligonucleotide
  Target: ANGPTL4; (+) strand; PAM type: NRG; PAM sequence: GAG
ttgctctgtcacccaagctg

SEQ ID NO: 9896 - DNA, 20 bp, Artificial Sequence
  Description of Artificial Sequence: Synthetic oligonucleotide
  Target: ANGPTL4; (+) strand; PAM type: NRG; PAM sequence: TGG
tcacccaagctggagtgcaa

SEQ ID NO: 9897 - DNA, 20 bp, Artificial Sequence
  Description of Artificial Sequence: Synthetic oligonucleotide
  Target: ANGPTL4; (+) strand; PAM type: NRG; PAM sequence: CAG
ggtacgatctccgcttactg

SEQ ID NO: 9898 - DNA, 20 bp, Artificial Sequence
  Description of Artificial Sequence: Synthetic oligonucleotide
  Target: ANGPTL4; (+) strand; PAM type: NRG; PAM sequence: TGG
ttactgcagcctccacctcc

SEQ ID NO: 9899 - DNA, 20 bp, Artificial Sequence
  Description of Artificial Sequence: Synthetic oligonucleotide
  Target: ANGPTL4; (+) strand; PAM type: NRG; PAM sequence: GGG
tactgcagcctccacctcct

SEQ ID NO: 9900 - DNA, 20 bp, Artificial Sequence
  Description of Artificial Sequence: Synthetic oligonucleotide
  Target: ANGPTL4; (+) strand; PAM type: NRG; PAM sequence: AAG
agcctccacctcctgggttc

SEQ ID NO: 9901 - DNA, 20 bp, Artificial Sequence
  Description of Artificial Sequence: Synthetic oligonucleotide
  Target: ANGPTL4; (+) strand; PAM type: NRG; PAM sequence: CAG
ttcaagcgaatctcccacct

SEQ ID NO: 9902 - DNA, 20 bp, Artificial Sequence
  Description of Artificial Sequence: Synthetic oligonucleotide
  Target: ANGPTL4; (+) strand; PAM type: NRG; PAM sequence: TAG
tcccacctcagcctcacaaa

SEQ ID NO: 9903 - DNA, 20 bp, Artificial Sequence
  Description of Artificial Sequence: Synthetic oligonucleotide
  Target: ANGPTL4; (+) strand; PAM type: NRG; PAM sequence: GAG
cctcagcctcacaaatagct

SEQ ID NO: 9904 - DNA, 20 bp, Artificial Sequence
  Description of Artificial Sequence: Synthetic oligonucleotide
  Target: ANGPTL4; (+) strand; PAM type: NRG; PAM sequence: CGG
ctcacaaatagctgagatta

SEQ ID NO: 9905 - DNA, 20 bp, Artificial Sequence
  Description of Artificial Sequence: Synthetic oligonucleotide
  Target: ANGPTL4; (+) strand; PAM type: NRG; PAM sequence: TAG
cctgctaatttctgtatttt

SEQ ID NO: 9906 - DNA, 20 bp, Artificial Sequence
  Description of Artificial Sequence: Synthetic oligonucleotide
  Target: ANGPTL4; (+) strand; PAM type: NRG; PAM sequence: TAG
gctaatttctgtatttttag

SEQ ID NO: 9907 - DNA, 20 bp, Artificial Sequence
  Description of Artificial Sequence: Synthetic oligonucleotide
  Target: ANGPTL4; (+) strand; PAM type: NRG; PAM sequence: GAG
taatttctgtatttttagta

SEQ ID NO: 9908 - DNA, 20 bp, Artificial Sequence
  Description of Artificial Sequence: Synthetic oligonucleotide
  Target: ANGPTL4; (+) strand; PAM type: NRG; PAM sequence: TGG
ttctgtatttttagtagaga

SEQ ID NO: 9909 - DNA, 20 bp, Artificial Sequence
  Description of Artificial Sequence: Synthetic oligonucleotide
  Target: ANGPTL4; (+) strand; PAM type: NRG; PAM sequence: GGG
tctgtatttttagtagagat

SEQ ID NO: 9910 - DNA, 20 bp, Artificial Sequence
  Description of Artificial Sequence: Synthetic oligonucleotide
  Target: ANGPTL4; (+) strand; PAM type: NRG; PAM sequence: GGG
ctgtatttttagtagagatg

SEQ ID NO: 9911 - DNA, 20 bp, Artificial Sequence
  Description of Artificial Sequence: Synthetic oligonucleotide
  Target: ANGPTL4; (+) strand; PAM type: NRG; PAM sequence: TGG
gagatggggtttcaccatgc

SEQ ID NO: 9912 - DNA, 20 bp, Artificial Sequence
  Description of Artificial Sequence: Synthetic oligonucleotide
  Target: ANGPTL4; (+) strand; PAM type: NRG; PAM sequence: CAG
tggggtttcaccatgctggc

SEQ ID NO: 9913 - DNA, 20 bp, Artificial Sequence
  Description of Artificial Sequence: Synthetic oligonucleotide
  Target: ANGPTL4; (+) strand; PAM type: NRG; PAM sequence: AGG
ggggtttcaccatgctggcc

SEQ ID NO: 9914 - DNA, 20 bp, Artificial Sequence
  Description of Artificial Sequence: Synthetic oligonucleotide
  Target: ANGPTL4; (+) strand; PAM type: NRG; PAM sequence: TGG
tttcaccatgctggccaggc

SEQ ID NO: 9915 - DNA, 20 bp, Artificial Sequence
  Description of Artificial Sequence: Synthetic oligonucleotide
  Target: ANGPTL4; (+) strand; PAM type: NRG; PAM sequence: CAG
ccaggctggtctcgaactcc

SEQ ID NO: 9916 - DNA, 20 bp, Artificial Sequence
  Description of Artificial Sequence: Synthetic oligonucleotide
  Target: ANGPTL4; (+) strand; PAM type: NRG; PAM sequence: AAG
ggtctcgaactcccagactc

SEQ ID NO: 9917 - DNA, 20 bp, Artificial Sequence
  Description of Artificial Sequence: Synthetic oligonucleotide
  Target: ANGPTL4; (+) strand; PAM type: NRG; PAM sequence: CAG
ctcaagtgatccacccacct

SEQ ID NO: 9918 - DNA, 20 bp, Artificial Sequence
  Description of Artificial Sequence: Synthetic oligonucleotide
  Target: ANGPTL4; (+) strand; PAM type: NRG; PAM sequence: AAG
ccacccacctcagcctccca

SEQ ID NO: 9919 - DNA, 20 bp, Artificial Sequence
  Description of Artificial Sequence: Synthetic oligonucleotide
  Target: ANGPTL4; (+) strand; PAM type: NRG; PAM sequence: TAG
acctcagcctcccaaagtgc

SEQ ID NO: 9920 - DNA, 20 bp, Artificial Sequence
  Description of Artificial Sequence: Synthetic oligonucleotide
  Target: ANGPTL4; (+) strand; PAM type: NRG; PAM sequence: AGG
cctcagcctcccaaagtgct

SEQ ID NO: 9921 - DNA, 20 bp, Artificial Sequence
  Description of Artificial Sequence: Synthetic oligonucleotide
  Target: ANGPTL4; (+) strand; PAM type: NRG; PAM sequence: CAG
ctcccaaagtgctaggatta

SEQ ID NO: 9922 - DNA, 20 bp, Artificial Sequence
  Description of Artificial Sequence: Synthetic oligonucleotide
  Target: ANGPTL4; (+) strand; PAM type: NRG; PAM sequence: AGG
tcccaaagtgctaggattac

SEQ ID NO: 9923 - DNA, 20 bp, Artificial Sequence
  Description of Artificial Sequence: Synthetic oligonucleotide
  Target: ANGPTL4; (+) strand; PAM type: NRG; PAM sequence: GAG
agtgctaggattacaggtgt

SEQ ID NO: 9924 - DNA, 20 bp, Artificial Sequence
  Description of Artificial Sequence: Synthetic oligonucleotide
  Target: ANGPTL4; (+) strand; PAM type: NRG; PAM sequence: CGG
acaggtgtgagccaccatgc

SEQ ID NO: 9925 - DNA, 20 bp, Artificial Sequence
  Description of Artificial Sequence: Synthetic oligonucleotide
  Target: ANGPTL4; (+) strand; PAM type: NRG; PAM sequence: GGG
caggtgtgagccaccatgcc

SEQ ID NO: 9926 - DNA, 20 bp, Artificial Sequence
  Description of Artificial Sequence: Synthetic oligonucleotide
  Target: ANGPTL4; (+) strand; PAM type: NRG; PAM sequence: CAG
tgagccaccatgccgggccc

SEQ ID NO: 9927 - DNA, 20 bp, Artificial Sequence
  Description of Artificial Sequence: Synthetic oligonucleotide
  Target: ANGPTL4; (+) strand; PAM type: NRG; PAM sequence: GAG
gctaattttttttttttttt

SEQ ID NO: 9928 - DNA, 20 bp, Artificial Sequence
  Description of Artificial Sequence: Synthetic oligonucleotide
  Target: ANGPTL4; (+) strand; PAM type: NRG; PAM sequence: CAG
atttttttttttttttgaga

SEQ ID NO: 9929 - DNA, 20 bp, Artificial Sequence
  Description of Artificial Sequence: Synthetic oligonucleotide
  Target: ANGPTL4; (+) strand; PAM type: NRG; PAM sequence: GAG
ttttttttttttttgagaca

SEQ ID NO: 9930 - DNA, 20 bp, Artificial Sequence
  Description of Artificial Sequence: Synthetic oligonucleotide
  Target: ANGPTL4; (+) strand; PAM type: NRG; PAM sequence: CAG
cagagtctcgccctgttgcc

SEQ ID NO: 9931 - DNA, 20 bp, Artificial Sequence
  Description of Artificial Sequence: Synthetic oligonucleotide
  Target: ANGPTL4; (+) strand; PAM type: NRG; PAM sequence: AGG
agagtctcgccctgttgccc

SEQ ID NO: 9932 - DNA, 20 bp, Artificial Sequence
  Description of Artificial Sequence: Synthetic oligonucleotide
  Target: ANGPTL4; (+) strand; PAM type: NRG; PAM sequence: TGG
tctcgccctgttgcccaggc

SEQ ID NO: 9933 - DNA, 20 bp, Artificial Sequence
  Description of Artificial Sequence: Synthetic oligonucleotide
  Target: ANGPTL4; (+) strand; PAM type: NRG; PAM sequence: GAG
tcgccctgttgcccaggctg

SEQ ID NO: 9934 - DNA, 20 bp, Artificial Sequence
  Description of Artificial Sequence: Synthetic oligonucleotide
  Target: ANGPTL4; (+) strand; PAM type: NRG; PAM sequence: CAG
ctgttgcccaggctggagtg

SEQ ID NO: 9935 - DNA, 20 bp, Artificial Sequence
  Description of Artificial Sequence: Synthetic oligonucleotide
  Target: ANGPTL4; (+) strand; PAM type: NRG; PAM sequence: TGG
ttgcccaggctggagtgcag

SEQ ID NO: 9936 - DNA, 20 bp, Artificial Sequence
  Description of Artificial Sequence: Synthetic oligonucleotide
  Target: ANGPTL4; (+) strand; PAM type: NRG; PAM sequence: CGG
ttactgcaccctctgcctcc

SEQ ID NO: 9937 - DNA, 20 bp, Artificial Sequence
  Description of Artificial Sequence: Synthetic oligonucleotide
  Target: ANGPTL4; (+) strand; PAM type: NRG; PAM sequence: GGG
tactgcaccctctgcctccc

SEQ ID NO: 9938 - DNA, 20 bp, Artificial Sequence
  Description of Artificial Sequence: Synthetic oligonucleotide
  Target: ANGPTL4; (+) strand; PAM type: NRG; PAM sequence: CAG
accctctgcctcccgggttc

SEQ ID NO: 9939 - DNA, 20 bp, Artificial Sequence
  Description of Artificial Sequence: Synthetic oligonucleotide
  Target: ANGPTL4; (+) strand; PAM type: NRG; PAM sequence: CAG
ttccagcgattctcctgccc

SEQ ID NO: 9940 - DNA, 20 bp, Artificial Sequence
  Description of Artificial Sequence: Synthetic oligonucleotide
  Target: ANGPTL4; (+) strand; PAM type: NRG; PAM sequence: GAG
ttctcctgccccagcctccc

SEQ ID NO: 9941 - DNA, 20 bp, Artificial Sequence
  Description of Artificial Sequence: Synthetic oligonucleotide
  Target: ANGPTL4; (+) strand; PAM type: NRG; PAM sequence: TGG
gccccagcctcccgagtaac

SEQ ID NO: 9942 - DNA, 20 bp, Artificial Sequence
  Description of Artificial Sequence: Synthetic oligonucleotide
  Target: ANGPTL4; (+) strand; PAM type: NRG; PAM sequence: GGG
ccccagcctcccgagtaact

SEQ ID NO: 9943 - DNA, 20 bp, Artificial Sequence
  Description of Artificial Sequence: Synthetic oligonucleotide
  Target: ANGPTL4; (+) strand; PAM type: NRG; PAM sequence: CAG
ctcccgagtaactgggatta

SEQ ID NO: 9944 - DNA, 20 bp, Artificial Sequence
  Description of Artificial Sequence: Synthetic oligonucleotide
  Target: ANGPTL4; (+) strand; PAM type: NRG; PAM sequence: AGG
tcccgagtaactgggattac

SEQ ID NO: 9945 - DNA, 20 bp, Artificial Sequence
  Description of Artificial Sequence: Synthetic oligonucleotide
  Target: ANGPTL4; (+) strand; PAM type: NRG; PAM sequence: TGG
caggcgcgcgcctccacgcc

SEQ ID NO: 9946 - DNA, 20 bp, Artificial Sequence
  Description of Artificial Sequence: Synthetic oligonucleotide
  Target: ANGPTL4; (+) strand; PAM type: NRG; PAM sequence: TAG
ctggctaatttttacatttt

SEQ ID NO: 9947 - DNA, 20 bp, Artificial Sequence
  Description of Artificial Sequence: Synthetic oligonucleotide
  Target: ANGPTL4; (+) strand; PAM type: NRG; PAM sequence: TAG
gctaatttttacatttttag

SEQ ID NO: 9948 - DNA, 20 bp, Artificial Sequence
  Description of Artificial Sequence: Synthetic oligonucleotide
  Target: ANGPTL4; (+) strand; PAM type: NRG; PAM sequence: GAG
taatttttacatttttagta

SEQ ID NO: 9949 - DNA, 20 bp, Artificial Sequence
  Description of Artificial Sequence: Synthetic oligonucleotide
  Target: ANGPTL4; (+) strand; PAM type: NRG; PAM sequence: CGG
tttacatttttagtagagac

SEQ ID NO: 9950 - DNA, 20 bp, Artificial Sequence
  Description of Artificial Sequence: Synthetic oligonucleotide
  Target: ANGPTL4; (+) strand; PAM type: NRG; PAM sequence: GGG
ttacatttttagtagagacc

SEQ ID NO: 9951 - DNA, 20 bp, Artificial Sequence
  Description of Artificial Sequence: Synthetic oligonucleotide
  Target: ANGPTL4; (+) strand; PAM type: NRG; PAM sequence: TGG
gagaccgggtttcaccatgt

SEQ ID NO: 9952 - DNA, 20 bp, Artificial Sequence
  Description of Artificial Sequence: Synthetic oligonucleotide
  Target: ANGPTL4; (+) strand; PAM type: NRG; PAM sequence: CAG
ccgggtttcaccatgttggt

SEQ ID NO: 9953 - DNA, 20 bp, Artificial Sequence
  Description of Artificial Sequence: Synthetic oligonucleotide
  Target: ANGPTL4; (+) strand; PAM type: NRG; PAM sequence: AGG
cgggtttcaccatgttggtc

SEQ ID NO: 9954 - DNA, 20 bp, Artificial Sequence
  Description of Artificial Sequence: Synthetic oligonucleotide
  Target: ANGPTL4; (+) strand; PAM type: NRG; PAM sequence: TGG
tttcaccatgttggtcaggc

SEQ ID NO: 9955 - DNA, 20 bp, Artificial Sequence
  Description of Artificial Sequence: Synthetic oligonucleotide
  Target: ANGPTL4; (+) strand; PAM type: NRG; PAM sequence: TGG
acctcacgatctgcccacct

SEQ ID NO: 9956 - DNA, 20 bp, Artificial Sequence
  Description of Artificial Sequence: Synthetic oligonucleotide
  Target: ANGPTL4; (+) strand; PAM type: NRG; PAM sequence: AAG
ctgcccaccttggactccca

SEQ ID NO: 9957 - DNA, 20 bp, Artificial Sequence
  Description of Artificial Sequence: Synthetic oligonucleotide
  Target: ANGPTL4; (+) strand; PAM type: NRG; PAM sequence: TGG
accttggactcccaaagtgc

SEQ ID NO: 9958 - DNA, 20 bp, Artificial Sequence
  Description of Artificial Sequence: Synthetic oligonucleotide
  Target: ANGPTL4; (+) strand; PAM type: NRG; PAM sequence: CAG
ctcccaaagtgctggtatta

SEQ ID NO: 9959 - DNA, 20 bp, Artificial Sequence
  Description of Artificial Sequence: Synthetic oligonucleotide
  Target: ANGPTL4; (+) strand; PAM type: NRG; PAM sequence: AGG
tcccaaagtgctggtattac

SEQ ID NO: 9960 - DNA, 20 bp, Artificial Sequence
  Description of Artificial Sequence: Synthetic oligonucleotide
  Target: ANGPTL4; (+) strand; PAM type: NRG; PAM sequence: GAG
agtgctggtattacaggcat

SEQ ID NO: 9961 - DNA, 20 bp, Artificial Sequence
  Description of Artificial Sequence: Synthetic oligonucleotide
  Target: ANGPTL4; (+) strand; PAM type: NRG; PAM sequence: CAG
caggcatgagccaccgtgcc

SEQ ID NO: 9962 - DNA, 20 bp, Artificial Sequence
  Description of Artificial Sequence: Synthetic oligonucleotide
  Target: ANGPTL4; (+) strand; PAM type: NRG; PAM sequence: TGG
atgagccaccgtgcccagcc

SEQ ID NO: 9963 - DNA, 20 bp, Artificial Sequence
  Description of Artificial Sequence: Synthetic oligonucleotide
  Target: ANGPTL4; (+) strand; PAM type: NRG; PAM sequence: CAG
caccgtgcccagcctggccc

SEQ ID NO: 9964 - DNA, 20 bp, Artificial Sequence
  Description of Artificial Sequence: Synthetic oligonucleotide
  Target: ANGPTL4; (+) strand; PAM type: NRG; PAM sequence: CAG
aattttttaaattttttgta

SEQ ID NO: 9965 - DNA, 20 bp, Artificial Sequence
  Description of Artificial Sequence: Synthetic oligonucleotide
  Target: ANGPTL4; (+) strand; PAM type: NRG; PAM sequence: CAG
ttttaaattttttgtacaga

SEQ ID NO: 9966 - DNA, 20 bp, Artificial Sequence
  Description of Artificial Sequence: Synthetic oligonucleotide
  Target: ANGPTL4; (+) strand; PAM type: NRG; PAM sequence: AGG
tttaaattttttgtacagac

SEQ ID NO: 9967 - DNA, 20 bp, Artificial Sequence
  Description of Artificial Sequence: Synthetic oligonucleotide
  Target: ANGPTL4; (+) strand; PAM type: NRG; PAM sequence: GGG
ttaaattttttgtacagaca

SEQ ID NO: 9968 - DNA, 20 bp, Artificial Sequence
  Description of Artificial Sequence: Synthetic oligonucleotide
  Target: ANGPTL4; (+) strand; PAM type: NRG; PAM sequence: TGG
gttacccaatcttgaactcc

SEQ ID NO: 9969 - DNA, 20 bp, Artificial Sequence
  Description of Artificial Sequence: Synthetic oligonucleotide
  Target: ANGPTL4; (+) strand; PAM type: NRG; PAM sequence: GGG
ttacccaatcttgaactcct

SEQ ID NO: 9970 - DNA, 20 bp, Artificial Sequence
  Description of Artificial Sequence: Synthetic oligonucleotide
  Target: ANGPTL4; (+) strand; PAM type: NRG; PAM sequence: AAG
aatcttgaactcctgggctc

SEQ ID NO: 9971 - DNA, 20 bp, Artificial Sequence
  Description of Artificial Sequence: Synthetic oligonucleotide
  Target: ANGPTL4; (+) strand; PAM type: NRG; PAM sequence: CAG
cttgaactcctgggctcaag

SEQ ID NO: 9972 - DNA, 20 bp, Artificial Sequence
  Description of Artificial Sequence: Synthetic oligonucleotide
  Target: ANGPTL4; (+) strand; PAM type: NRG; PAM sequence: TGG
ctcaagcagtcctcccacct

SEQ ID NO: 9973 - DNA, 20 bp, Artificial Sequence
  Description of Artificial Sequence: Synthetic oligonucleotide
  Target: ANGPTL4; (+) strand; PAM type: NRG; PAM sequence: AAG
cctcccaccttggcctccca

SEQ ID NO: 9974 - DNA, 20 bp, Artificial Sequence
  Description of Artificial Sequence: Synthetic oligonucleotide
  Target: ANGPTL4; (+) strand; PAM type: NRG; PAM sequence: TGG
accttggcctcccaaagtac

SEQ ID NO: 9975 - DNA, 20 bp, Artificial Sequence
  Description of Artificial Sequence: Synthetic oligonucleotide
  Target: ANGPTL4; (+) strand; PAM type: NRG; PAM sequence: GGG
ccttggcctcccaaagtact

SEQ ID NO: 9976 - DNA, 20 bp, Artificial Sequence
  Description of Artificial Sequence: Synthetic oligonucleotide
  Target: ANGPTL4; (+) strand; PAM type: NRG; PAM sequence: AAG
tcccaaagtactgggattac

SEQ ID NO: 9977 - DNA, 20 bp, Artificial Sequence
  Description of Artificial Sequence: Synthetic oligonucleotide
  Target: ANGPTL4; (+) strand; PAM type: NRG; PAM sequence: GAG
agtactgggattacaagcat

SEQ ID NO: 9978 - DNA, 20 bp, Artificial Sequence
  Description of Artificial Sequence: Synthetic oligonucleotide
  Target: ANGPTL4; (+) strand; PAM type: NRG; PAM sequence: TAG
caagcatgagccaccttgcc

SEQ ID NO: 9979 - DNA, 20 bp, Artificial Sequence
  Description of Artificial Sequence: Synthetic oligonucleotide
  Target: ANGPTL4; (+) strand; PAM type: NRG; PAM sequence: TGG
agccaccttgcctagcttaa

SEQ ID NO: 9980 - DNA, 20 bp, Artificial Sequence
  Description of Artificial Sequence: Synthetic oligonucleotide
  Target: ANGPTL4; (+) strand; PAM type: NRG; PAM sequence: TAG
cttaatggcatttacatttg

SEQ ID NO: 9981 - DNA, 20 bp, Artificial Sequence
  Description of Artificial Sequence: Synthetic oligonucleotide
  Target: ANGPTL4; (+) strand; PAM type: NRG; PAM sequence: CAG
ttgtagtgaaatacacataa

SEQ ID NO: 9982 - DNA, 20 bp, Artificial Sequence
  Description of Artificial Sequence: Synthetic oligonucleotide
  Target: ANGPTL4; (+) strand; PAM type: NRG; PAM sequence: AGG
tgtagtgaaatacacataac

SEQ ID NO: 9983 - DNA, 20 bp, Artificial Sequence
  Description of Artificial Sequence: Synthetic oligonucleotide
  Target: ANGPTL4; (+) strand; PAM type: NRG; PAM sequence: TGG
gtgaaatacacataacaggc

SEQ ID NO: 9984 - DNA, 20 bp, Artificial Sequence
  Description of Artificial Sequence: Synthetic oligonucleotide
  Target: ANGPTL4; (+) strand; PAM type: NRG; PAM sequence: GGG
tgaaatacacataacaggct

SEQ ID NO: 9985 - DNA, 20 bp, Artificial Sequence
  Description of Artificial Sequence: Synthetic oligonucleotide
  Target: ANGPTL4; (+) strand; PAM type: NRG; PAM sequence: CAG
tacacataacaggctgggcg

SEQ ID NO: 9986 - DNA, 20 bp, Artificial Sequence
  Description of Artificial Sequence: Synthetic oligonucleotide
  Target: ANGPTL4; (+) strand; PAM type: NRG; PAM sequence: TGG
acataacaggctgggcgcag

SEQ ID NO: 9987 - DNA, 20 bp, Artificial Sequence
  Description of Artificial Sequence: Synthetic oligonucleotide
  Target: ANGPTL4; (+) strand; PAM type: NRG; PAM sequence: CAG
gtggctcatacctgtaatcc

SEQ ID NO: 9988 - DNA, 20 bp, Artificial Sequence
  Description of Artificial Sequence: Synthetic oligonucleotide
  Target: ANGPTL4; (+) strand; PAM type: NRG; PAM sequence: TGG
tacctgtaatcccagcactt

SEQ ID NO: 9989 - DNA, 20 bp, Artificial Sequence
  Description of Artificial Sequence: Synthetic oligonucleotide
  Target: ANGPTL4; (+) strand; PAM type: NRG; PAM sequence: GGG
acctgtaatcccagcacttt

SEQ ID NO: 9990 - DNA, 20 bp, Artificial Sequence
  Description of Artificial Sequence: Synthetic oligonucleotide
  Target: ANGPTL4; (+) strand; PAM type: NRG; PAM sequence: GAG
ctgtaatcccagcactttgg

SEQ ID NO: 9991 - DNA, 20 bp, Artificial Sequence
  Description of Artificial Sequence: Synthetic oligonucleotide
  Target: ANGPTL4; (+) strand; PAM type: NRG; PAM sequence: AGG
tgtaatcccagcactttggg

SEQ ID NO: 9992 - DNA, 20 bp, Artificial Sequence
  Description of Artificial Sequence: Synthetic oligonucleotide
  Target: ANGPTL4; (+) strand; PAM type: NRG; PAM sequence: GAG
tcccagcactttgggaggcc

SEQ ID NO: 9993 - DNA, 20 bp, Artificial Sequence
  Description of Artificial Sequence: Synthetic oligonucleotide
  Target: ANGPTL4; (+) strand; PAM type: NRG; PAM sequence: AGG
cccagcactttgggaggccg

SEQ ID NO: 9994 - DNA, 20 bp, Artificial Sequence
  Description of Artificial Sequence: Synthetic oligonucleotide
  Target: ANGPTL4; (+) strand; PAM type: NRG; PAM sequence: TAG
agcactttgggaggccgagg

SEQ ID NO: 9995 - DNA, 20 bp, Artificial Sequence
  Description of Artificial Sequence: Synthetic oligonucleotide
  Target: ANGPTL4; (+) strand; PAM type: NRG; PAM sequence: AGG
gcactttgggaggccgaggt

SEQ ID NO: 9996 - DNA, 20 bp, Artificial Sequence
  Description of Artificial Sequence: Synthetic oligonucleotide
  Target: ANGPTL4; (+) strand; PAM type: NRG; PAM sequence: CGG
ctttgggaggccgaggtagg

SEQ ID NO: 9997 - DNA, 20 bp, Artificial Sequence
  Description of Artificial Sequence: Synthetic oligonucleotide
  Target: ANGPTL4; (+) strand; PAM type: NRG; PAM sequence: GAG
ccgaggtaggcggatcacct

SEQ ID NO: 9998 - DNA, 20 bp, Artificial Sequence
  Description of Artificial Sequence: Synthetic oligonucleotide
  Target: ANGPTL4; (+) strand; PAM type: NRG; PAM sequence: AGG
cgaggtaggcggatcacctg

SEQ ID NO: 9999 - DNA, 20 bp, Artificial Sequence
  Description of Artificial Sequence: Synthetic oligonucleotide
  Target: ANGPTL4; (+) strand; PAM type: NRG; PAM sequence: CAG
gtaggcggatcacctgaggt

SEQ ID NO: 10000 - DNA, 20 bp, Artificial Sequence
  Description of Artificial Sequence: Synthetic oligonucleotide
  Target: ANGPTL4; (+) strand; PAM type: NRG; PAM sequence: AGG
taggcggatcacctgaggtc

SEQ ID NO: 10001 - DNA, 20 bp, Artificial Sequence
  Description of Artificial Sequence: Synthetic oligonucleotide
  Target: ANGPTL4; (+) strand; PAM type: NRG; PAM sequence: GAG
ggcggatcacctgaggtcag

SEQ ID NO: 10002 - DNA, 20 bp, Artificial Sequence
  Description of Artificial Sequence: Synthetic oligonucleotide
  Target: ANGPTL4; (+) strand; PAM type: NRG; PAM sequence: TAG
gatcacctgaggtcaggagt

SEQ ID NO: 10003 - DNA, 20 bp, Artificial Sequence
  Description of Artificial Sequence: Synthetic oligonucleotide
  Target: ANGPTL4; (+) strand; PAM type: NRG; PAM sequence: GAG
tcacctgaggtcaggagtta

SEQ ID NO: 10004 - DNA, 20 bp, Artificial Sequence
  Description of Artificial Sequence: Synthetic oligonucleotide
  Target: ANGPTL4; (+) strand; PAM type: NRG; PAM sequence: CAG
tgaggtcaggagttagagac

SEQ ID NO: 10005 - DNA, 20 bp, Artificial Sequence
  Description of Artificial Sequence: Synthetic oligonucleotide
  Target: ANGPTL4; (+) strand; PAM type: NRG; PAM sequence: TGG
tcaggagttagagaccagcc

SEQ ID NO: 10006 - DNA, 20 bp, Artificial Sequence
  Description of Artificial Sequence: Synthetic oligonucleotide
  Target: ANGPTL4; (+) strand; PAM type: NRG; PAM sequence: TGG
gttagagaccagcctggaca

SEQ ID NO: 10007 - DNA, 20 bp, Artificial Sequence
  Description of Artificial Sequence: Synthetic oligonucleotide
  Target: ANGPTL4; (+) strand; PAM type: NRG; PAM sequence: TAG
ctctactaaaatacaaaaat

SEQ ID NO: 10008 - DNA, 20 bp, Artificial Sequence
  Description of Artificial Sequence: Synthetic oligonucleotide
  Target: ANGPTL4; (+) strand; PAM type: NRG; PAM sequence: CAG
actaaaatacaaaaattagc

SEQ ID NO: 10009 - DNA, 20 bp, Artificial Sequence
  Description of Artificial Sequence: Synthetic oligonucleotide
  Target: ANGPTL4; (+) strand; PAM type: NRG; PAM sequence: AGG
ctaaaatacaaaaattagcc

SEQ ID NO: 10010 - DNA, 20 bp, Artificial Sequence
  Description of Artificial Sequence: Synthetic oligonucleotide
  Target: ANGPTL4; (+) strand; PAM type: NRG; PAM sequence: TGG
atacaaaaattagccaggcg

SEQ ID NO: 10011 - DNA, 20 bp, Artificial Sequence
  Description of Artificial Sequence: Synthetic oligonucleotide
  Target: ANGPTL4; (+) strand; PAM type: NRG; PAM sequence: TGG
caaaaattagccaggcgtgg

SEQ ID NO: 10012 - DNA, 20 bp, Artificial Sequence
  Description of Artificial Sequence: Synthetic oligonucleotide
  Target: ANGPTL4; (+) strand; PAM type: NRG; PAM sequence: TGG
aaattagccaggcgtggtgg

SEQ ID NO: 10013 - DNA, 20 bp, Artificial Sequence
  Description of Artificial Sequence: Synthetic oligonucleotide
  Target: ANGPTL4; (+) strand; PAM type: NRG; PAM sequence: GGG
aattagccaggcgtggtggt

SEQ ID NO: 10014 - DNA, 20 bp, Artificial Sequence
  Description of Artificial Sequence: Synthetic oligonucleotide
  Target: ANGPTL4; (+) strand; PAM type: NRG; PAM sequence: CAG
gtggtgggcacctgtaatcc

SEQ ID NO: 10015 - DNA, 20 bp, Artificial Sequence
  Description of Artificial Sequence: Synthetic oligonucleotide
  Target: ANGPTL4; (+) strand; PAM type: NRG; PAM sequence: CGG
cacctgtaatcccagctact

SEQ ID NO: 10016 - DNA, 20 bp, Artificial Sequence
  Description of Artificial Sequence: Synthetic oligonucleotide
  Target: ANGPTL4; (+) strand; PAM type: NRG; PAM sequence: GGG
acctgtaatcccagctactc

SEQ ID NO: 10017 - DNA, 20 bp, Artificial Sequence
  Description of Artificial Sequence: Synthetic oligonucleotide
  Target: ANGPTL4; (+) strand; PAM type: NRG; PAM sequence: GAG
ctgtaatcccagctactcgg

SEQ ID NO: 10018 - DNA, 20 bp, Artificial Sequence
  Description of Artificial Sequence: Synthetic oligonucleotide
  Target: ANGPTL4; (+) strand; PAM type: NRG; PAM sequence: AGG
tgtaatcccagctactcggg

SEQ ID NO: 10019 - DNA, 20 bp, Artificial Sequence
  Description of Artificial Sequence: Synthetic oligonucleotide
  Target: ANGPTL4; (+) strand; PAM type: NRG; PAM sequence: GAG
tcccagctactcgggaggct

SEQ ID NO: 10020 - DNA, 20 bp, Artificial Sequence
  Description of Artificial Sequence: Synthetic oligonucleotide
  Target: ANGPTL4; (+) strand; PAM type: NRG; PAM sequence: AGG
cccagctactcgggaggctg

SEQ ID NO: 10021 - DNA, 20 bp, Artificial Sequence
  Description of Artificial Sequence: Synthetic oligonucleotide
  Target: ANGPTL4; (+) strand; PAM type: NRG; PAM sequence: CAG
agctactcgggaggctgagg

SEQ ID NO: 10022 - DNA, 20 bp, Artificial Sequence
  Description of Artificial Sequence: Synthetic oligonucleotide
  Target: ANGPTL4; (+) strand; PAM type: NRG; PAM sequence: AGG
gctactcgggaggctgaggc

SEQ ID NO: 10023 - DNA, 20 bp, Artificial Sequence
  Description of Artificial Sequence: Synthetic oligonucleotide
  Target: ANGPTL4; (+) strand; PAM type: NRG; PAM sequence: GAG
tactcgggaggctgaggcag

SEQ ID NO: 10024 - DNA, 20 bp, Artificial Sequence
  Description of Artificial Sequence: Synthetic oligonucleotide
  Target: ANGPTL4; (+) strand; PAM type: NRG; PAM sequence: CAG
gcaggagaatcatttgaacc

SEQ ID NO: 10025 - DNA, 20 bp, Artificial Sequence
  Description of Artificial Sequence: Synthetic oligonucleotide
  Target: ANGPTL4; (+) strand; PAM type: NRG; PAM sequence: AGG
caggagaatcatttgaaccc

SEQ ID NO: 10026 - DNA, 20 bp, Artificial Sequence
  Description of Artificial Sequence: Synthetic oligonucleotide
  Target: ANGPTL4; (+) strand; PAM type: NRG; PAM sequence: GAG
ggagaatcatttgaacccag

SEQ ID NO: 10027 - DNA, 20 bp, Artificial Sequence
  Description of Artificial Sequence: Synthetic oligonucleotide
  Target: ANGPTL4; (+) strand; PAM type: NRG; PAM sequence: AGG
gagaatcatttgaacccagg

SEQ ID NO: 10028 - DNA, 20 bp, Artificial Sequence
  Description of Artificial Sequence: Synthetic oligonucleotide
  Target: ANGPTL4; (+) strand; PAM type: NRG; PAM sequence: TGG
aatcatttgaacccaggagg

SEQ ID NO: 10029 - DNA, 20 bp, Artificial Sequence
  Description of Artificial Sequence: Synthetic oligonucleotide
  Target: ANGPTL4; (+) strand; PAM type: NRG; PAM sequence: AAG
catttgaacccaggaggtgg

SEQ ID NO: 10030 - DNA, 20 bp, Artificial Sequence
  Description of Artificial Sequence: Synthetic oligonucleotide
  Target: ANGPTL4; (+) strand; PAM type: NRG; PAM sequence: CAG
aacccaggaggtggaagttg

SEQ ID NO: 10031 - DNA, 20 bp, Artificial Sequence
  Description of Artificial Sequence: Synthetic oligonucleotide
  Target: ANGPTL4; (+) strand; PAM type: NRG; PAM sequence: GAG
caggaggtggaagttgcagt

SEQ ID NO: 10032 - DNA, 20 bp, Artificial Sequence
  Description of Artificial Sequence: Synthetic oligonucleotide
  Target: ANGPTL4; (+) strand; PAM type: NRG; PAM sequence: CAG
gaggtggaagttgcagtgag

SEQ ID NO: 10033 - DNA, 20 bp, Artificial Sequence
  Description of Artificial Sequence: Synthetic oligonucleotide
  Target: ANGPTL4; (+) strand; PAM type: NRG; PAM sequence: GAG
ggtggaagttgcagtgagca

SEQ ID NO: 10034 - DNA, 20 bp, Artificial Sequence
  Description of Artificial Sequence: Synthetic oligonucleotide
  Target: ANGPTL4; (+) strand; PAM type: NRG; PAM sequence: CAG
gagattgcaccactgcactc

SEQ ID NO: 10035 - DNA, 20 bp, Artificial Sequence
  Description of Artificial Sequence: Synthetic oligonucleotide
  Target: ANGPTL4; (+) strand; PAM type: NRG; PAM sequence: TGG
gcaccactgcactccagcct

SEQ ID NO: 10036 - DNA, 20 bp, Artificial Sequence
  Description of Artificial Sequence: Synthetic oligonucleotide
  Target: ANGPTL4; (+) strand; PAM type: NRG; PAM sequence: CAG
ctgcactccagccttggcga

SEQ ID NO: 10037 - DNA, 20 bp, Artificial Sequence
  Description of Artificial Sequence: Synthetic oligonucleotide
  Target: ANGPTL4; (+) strand; PAM type: NRG; PAM sequence: GAG
gcactccagccttggcgaca

SEQ ID NO: 10038 - DNA, 20 bp, Artificial Sequence
  Description of Artificial Sequence: Synthetic oligonucleotide
  Target: ANGPTL4; (+) strand; PAM type: NRG; PAM sequence: AAG
tccagccttggcgacagagc

SEQ ID NO: 10039 - DNA, 20 bp, Artificial Sequence
  Description of Artificial Sequence: Synthetic oligonucleotide
  Target: ANGPTL4; (+) strand; PAM type: NRG; PAM sequence: AAG
caagactctgtctcaaaaaa

SEQ ID NO: 10040 - DNA, 20 bp, Artificial Sequence
  Description of Artificial Sequence: Synthetic oligonucleotide
  Target: ANGPTL4; (+) strand; PAM type: NRG; PAM sequence: AAG
ctcaaaaaaaagaaaaaaaa

SEQ ID NO: 10041 - DNA, 20 bp, Artificial Sequence
  Description of Artificial Sequence: Synthetic oligonucleotide
  Target: ANGPTL4; (+) strand; PAM type: NRG; PAM sequence: AAG
aaaaaagaaaaaaaaaagaa

SEQ ID NO: 10042 - DNA, 20 bp, Artificial Sequence
  Description of Artificial Sequence: Synthetic oligonucleotide
  Target: ANGPTL4; (+) strand; PAM type: NRG; PAM sequence: AAG
agaaaaaaaaaagaaaagaa

SEQ ID NO: 10043 - DNA, 20 bp, Artificial Sequence
  Description of Artificial Sequence: Synthetic oligonucleotide
  Target: ANGPTL4; (+) strand; PAM type: NRG; PAM sequence: AAG
aaagaaaagaaaagaaaaaa

SEQ ID NO: 10044 - DNA, 20 bp, Artificial Sequence
  Description of Artificial Sequence: Synthetic oligonucleotide
  Target: ANGPTL4; (+) strand; PAM type: NRG; PAM sequence: AAG
aagaaaagaaaaaaaagaaa

SEQ ID NO: 10045 - DNA, 20 bp, Artificial Sequence
  Description of Artificial Sequence: Synthetic oligonucleotide
  Target: ANGPTL4; (+) strand; PAM type: NRG; PAM sequence: AAG
aaaaaaaagaaaaagaaaaa

SEQ ID NO: 10046 - DNA, 20 bp, Artificial Sequence
  Description of Artificial Sequence: Synthetic oligonucleotide
  Target: ANGPTL4; (+) strand; PAM type: NRG; PAM sequence: TGG
aaatatacataatataaaat

SEQ ID NO: 10047 - DNA, 20 bp, Artificial Sequence
  Description of Artificial Sequence: Synthetic oligonucleotide
  Target: ANGPTL4; (+) strand; PAM type: NRG; PAM sequence: TGG
ttaacaatttttaactatgt

SEQ ID NO: 10048 - DNA, 20 bp, Artificial Sequence
  Description of Artificial Sequence: Synthetic oligonucleotide
  Target: ANGPTL4; (+) strand; PAM type: NRG; PAM sequence: AAG
atttttaactatgttggcca

SEQ ID NO: 10049 - DNA, 20 bp, Artificial Sequence
  Description of Artificial Sequence: Synthetic oligonucleotide
  Target: ANGPTL4; (+) strand; PAM type: NRG; PAM sequence: TAG
tttaactatgttggccaaag

SEQ ID NO: 10050 - DNA, 20 bp, Artificial Sequence
  Description of Artificial Sequence: Synthetic oligonucleotide
  Target: ANGPTL4; (+) strand; PAM type: NRG; PAM sequence: TGG
ggccaaagtagcccacgcgt

SEQ ID NO: 10051 - DNA, 20 bp, Artificial Sequence
  Description of Artificial Sequence: Synthetic oligonucleotide
  Target: ANGPTL4; (+) strand; PAM type: NRG; PAM sequence: GGG
gccaaagtagcccacgcgtt

SEQ ID NO: 10052 - DNA, 20 bp, Artificial Sequence
  Description of Artificial Sequence: Synthetic oligonucleotide
  Target: ANGPTL4; (+) strand; PAM type: NRG; PAM sequence: TGG
agtagcccacgcgttgggat

SEQ ID NO: 10053 - DNA, 20 bp, Artificial Sequence
  Description of Artificial Sequence: Synthetic oligonucleotide
  Target: ANGPTL4; (+) strand; PAM type: NRG; PAM sequence: GAG
tagcccacgcgttgggattg

SEQ ID NO: 10054 - DNA, 20 bp, Artificial Sequence
  Description of Artificial Sequence: Synthetic oligonucleotide
  Target: ANGPTL4; (+) strand; PAM type: NRG; PAM sequence: CGG
acgcgttgggattggagacc

SEQ ID NO: 10055 - DNA, 20 bp, Artificial Sequence
  Description of Artificial Sequence: Synthetic oligonucleotide
  Target: ANGPTL4; (+) strand; PAM type: NRG; PAM sequence: CAG
cttgcccaccgtgatcgccc

SEQ ID NO: 10056 - DNA, 20 bp, Artificial Sequence
  Description of Artificial Sequence: Synthetic oligonucleotide
  Target: ANGPTL4; (+) strand; PAM type: NRG; PAM sequence: CAG
ccaccgtgatcgccccagta

SEQ ID NO: 10057 - DNA, 20 bp, Artificial Sequence
  Description of Artificial Sequence: Synthetic oligonucleotide
  Target: ANGPTL4; (+) strand; PAM type: NRG; PAM sequence: TGG
gatcgccccagtacagtgcc

SEQ ID NO: 10058 - DNA, 20 bp, Artificial Sequence
  Description of Artificial Sequence: Synthetic oligonucleotide
  Target: ANGPTL4; (+) strand; PAM type: NRG; PAM sequence: TAG
ccagtacagtgcctggcata

SEQ ID NO: 10059 - DNA, 20 bp, Artificial Sequence
  Description of Artificial Sequence: Synthetic oligonucleotide
  Target: ANGPTL4; (+) strand; PAM type: NRG; PAM sequence: TAG
gtacagtgcctggcatatag

SEQ ID NO: 10060 - DNA, 20 bp, Artificial Sequence
  Description of Artificial Sequence: Synthetic oligonucleotide
  Target: ANGPTL4; (+) strand; PAM type: NRG; PAM sequence: AGG
tacagtgcctggcatatagt

SEQ ID NO: 10061 - DNA, 20 bp, Artificial Sequence
  Description of Artificial Sequence: Synthetic oligonucleotide
  Target: ANGPTL4; (+) strand; PAM type: NRG; PAM sequence: CAG
ctggcatatagtaggtgctc

SEQ ID NO: 10062 - DNA, 20 bp, Artificial Sequence
  Description of Artificial Sequence: Synthetic oligonucleotide
  Target: ANGPTL4; (+) strand; PAM type: NRG; PAM sequence: AGG
tggcatatagtaggtgctcc

SEQ ID NO: 10063 - DNA, 20 bp, Artificial Sequence
  Description of Artificial Sequence: Synthetic oligonucleotide
  Target: ANGPTL4; (+) strand; PAM type: NRG; PAM sequence: CAG
gtgctccaggaacaattgat

SEQ ID NO: 10064 - DNA, 20 bp, Artificial Sequence
  Description of Artificial Sequence: Synthetic oligonucleotide
  Target: ANGPTL4; (+) strand; PAM type: NRG; PAM sequence: AGG
tgctccaggaacaattgatc

SEQ ID NO: 10065 - DNA, 20 bp, Artificial Sequence
  Description of Artificial Sequence: Synthetic oligonucleotide
  Target: ANGPTL4; (+) strand; PAM type: NRG; PAM sequence: TGG
caggatgactttgtctttgc

SEQ ID NO: 10066 - DNA, 20 bp, Artificial Sequence
  Description of Artificial Sequence: Synthetic oligonucleotide
  Target: ANGPTL4; (+) strand; PAM type: NRG; PAM sequence: GGG
aggatgactttgtctttgct

SEQ ID NO: 10067 - DNA, 20 bp, Artificial Sequence
  Description of Artificial Sequence: Synthetic oligonucleotide
  Target: ANGPTL4; (+) strand; PAM type: NRG; PAM sequence: AAG
tgactttgtctttgctgggt

SEQ ID NO: 10068 - DNA, 20 bp, Artificial Sequence
  Description of Artificial Sequence: Synthetic oligonucleotide
  Target: ANGPTL4; (+) strand; PAM type: NRG; PAM sequence: GAG
actttgtctttgctgggtaa

SEQ ID NO: 10069 - DNA, 20 bp, Artificial Sequence
  Description of Artificial Sequence: Synthetic oligonucleotide
  Target: ANGPTL4; (+) strand; PAM type: NRG; PAM sequence: AGG
ctttgtctttgctgggtaag

SEQ ID NO: 10070 - DNA, 20 bp, Artificial Sequence
  Description of Artificial Sequence: Synthetic oligonucleotide
  Target: ANGPTL4; (+) strand; PAM type: NRG; PAM sequence: AAG
gggtaagaggccacattcta

SEQ ID NO: 10071 - DNA, 20 bp, Artificial Sequence
  Description of Artificial Sequence: Synthetic oligonucleotide
  Target: ANGPTL4; (+) strand; PAM type: NRG; PAM sequence: AGG
ggtaagaggccacattctaa

SEQ ID NO: 10072 - DNA, 20 bp, Artificial Sequence
  Description of Artificial Sequence: Synthetic oligonucleotide
  Target: ANGPTL4; (+) strand; PAM type: NRG; PAM sequence: CAG
agaggccacattctaaaggt

SEQ ID NO: 10073 - DNA, 20 bp, Artificial Sequence
  Description of Artificial Sequence: Synthetic oligonucleotide
  Target: ANGPTL4; (+) strand; PAM type: NRG; PAM sequence: TGG
acattctaaaggtcagtttt

SEQ ID NO: 10074 - DNA, 20 bp, Artificial Sequence
  Description of Artificial Sequence: Synthetic oligonucleotide
  Target: ANGPTL4; (+) strand; PAM type: NRG; PAM sequence: CAG
tctaaaggtcagtttttggc

SEQ ID NO: 10075 - DNA, 20 bp, Artificial Sequence
  Description of Artificial Sequence: Synthetic oligonucleotide
  Target: ANGPTL4; (+) strand; PAM type: NRG; PAM sequence: AGG
ctaaaggtcagtttttggcc

SEQ ID NO: 10076 - DNA, 20 bp, Artificial Sequence
  Description of Artificial Sequence: Synthetic oligonucleotide
  Target: ANGPTL4; (+) strand; PAM type: NRG; PAM sequence: CAG
ggtcagtttttggccaggca

SEQ ID NO: 10077 - DNA, 20 bp, Artificial Sequence
  Description of Artificial Sequence: Synthetic oligonucleotide
  Target: ANGPTL4; (+) strand; PAM type: NRG; PAM sequence: CAG
gtgactcacacctgtcatcc

SEQ ID NO: 10078 - DNA, 20 bp, Artificial Sequence
  Description of Artificial Sequence: Synthetic oligonucleotide
  Target: ANGPTL4; (+) strand; PAM type: NRG; PAM sequence: TGG
cacctgtcatcccagcactt

SEQ ID NO: 10079 - DNA, 20 bp, Artificial Sequence
  Description of Artificial Sequence: Synthetic oligonucleotide
  Target: ANGPTL4; (+) strand; PAM type: NRG; PAM sequence: GGG
acctgtcatcccagcacttt

SEQ ID NO: 10080 - DNA, 20 bp, Artificial Sequence
  Description of Artificial Sequence: Synthetic oligonucleotide
  Target: ANGPTL4; (+) strand; PAM type: NRG; PAM sequence: GAG
ctgtcatcccagcactttgg

SEQ ID NO: 10081 - DNA, 20 bp, Artificial Sequence
  Description of Artificial Sequence: Synthetic oligonucleotide
  Target: ANGPTL4; (+) strand; PAM type: NRG; PAM sequence: AGG
tgtcatcccagcactttggg

SEQ ID NO: 10082 - DNA, 20 bp, Artificial Sequence
  Description of Artificial Sequence: Synthetic oligonucleotide
  Target: ANGPTL4; (+) strand; PAM type: NRG; PAM sequence: GAG
tcccagcactttgggaggcc

SEQ ID NO: 10083 - DNA, 20 bp, Artificial Sequence
  Description of Artificial Sequence: Synthetic oligonucleotide
  Target: ANGPTL4; (+) strand; PAM type: NRG; PAM sequence: AGG
cccagcactttgggaggccg

SEQ ID NO: 10084 - DNA, 20 bp, Artificial Sequence
  Description of Artificial Sequence: Synthetic oligonucleotide
  Target: ANGPTL4; (+) strand; PAM type: NRG; PAM sequence: GAG
gcactttgggaggccgaggc

SEQ ID NO: 10085 - DNA, 20 bp, Artificial Sequence
  Description of Artificial Sequence: Synthetic oligonucleotide
  Target: ANGPTL4; (+) strand; PAM type: NRG; PAM sequence: GAG
ccgaggcgagtgaatccctt

SEQ ID NO: 10086 - DNA, 20 bp, Artificial Sequence
  Description of Artificial Sequence: Synthetic oligonucleotide
  Target: ANGPTL4; (+) strand; PAM type: NRG; PAM sequence: CAG
gcgagtgaatcccttgagct

SEQ ID NO: 10087 - DNA, 20 bp, Artificial Sequence
  Description of Artificial Sequence: Synthetic oligonucleotide
  Target: ANGPTL4; (+) strand; PAM type: NRG; PAM sequence: AGG
cgagtgaatcccttgagctc

SEQ ID NO: 10088 - DNA, 20 bp, Artificial Sequence
  Description of Artificial Sequence: Synthetic oligonucleotide
  Target: ANGPTL4; (+) strand; PAM type: NRG; PAM sequence: GAG
agtgaatcccttgagctcag

SEQ ID NO: 10089 - DNA, 20 bp, Artificial Sequence
  Description of Artificial Sequence: Synthetic oligonucleotide
  Target: ANGPTL4; (+) strand; PAM type: NRG; PAM sequence: AAG
tcccttgagctcaggagttc

SEQ ID NO: 10090 - DNA, 20 bp, Artificial Sequence
  Description of Artificial Sequence: Synthetic oligonucleotide
  Target: ANGPTL4; (+) strand; PAM type: NRG; PAM sequence: CAG
tgagctcaggagttcaagac

SEQ ID NO: 10091 - DNA, 20 bp, Artificial Sequence
  Description of Artificial Sequence: Synthetic oligonucleotide
  Target: ANGPTL4; (+) strand; PAM type: NRG; PAM sequence: TGG
tcaggagttcaagaccagcc

SEQ ID NO: 10092 - DNA, 20 bp, Artificial Sequence
  Description of Artificial Sequence: Synthetic oligonucleotide
  Target: ANGPTL4; (+) strand; PAM type: NRG; PAM sequence: GGG
caggagttcaagaccagcct

SEQ ID NO: 10093 - DNA, 20 bp, Artificial Sequence
  Description of Artificial Sequence: Synthetic oligonucleotide
  Target: ANGPTL4; (+) strand; PAM type: NRG; PAM sequence: CGG
caagaccagcctgggcaaca

SEQ ID NO: 10094 - DNA, 20 bp, Artificial Sequence
  Description of Artificial Sequence: Synthetic oligonucleotide
  Target: ANGPTL4; (+) strand; PAM type: NRG; PAM sequence: CAG
tcctgtctctacaaaatcta

SEQ ID NO: 10095 - DNA, 20 bp, Artificial Sequence
  Description of Artificial Sequence: Synthetic oligonucleotide
  Target: ANGPTL4; (+) strand; PAM type: NRG; PAM sequence: TAG
tctacaaaatctacagaaat

SEQ ID NO: 10096 - DNA, 20 bp, Artificial Sequence
  Description of Artificial Sequence: Synthetic oligonucleotide
  Target: ANGPTL4; (+) strand; PAM type: NRG; PAM sequence: AGG
ctacaaaatctacagaaatt

SEQ ID NO: 10097 - DNA, 20 bp, Artificial Sequence
  Description of Artificial Sequence: Synthetic oligonucleotide
  Target: ANGPTL4; (+) strand; PAM type: NRG; PAM sequence: CAG
caaaatctacagaaattagg

SEQ ID NO: 10098 - DNA, 20 bp, Artificial Sequence
  Description of Artificial Sequence: Synthetic oligonucleotide
  Target: ANGPTL4; (+) strand; PAM type: NRG; PAM sequence: AGG
aaaatctacagaaattaggc

SEQ ID NO: 10099 - DNA, 20 bp, Artificial Sequence
  Description of Artificial Sequence: Synthetic oligonucleotide
  Target: ANGPTL4; (+) strand; PAM type: NRG; PAM sequence: TGG
ctacagaaattaggcaggtc

SEQ ID NO: 10100 - DNA, 20 bp, Artificial Sequence
  Description of Artificial Sequence: Synthetic oligonucleotide
  Target: ANGPTL4; (+) strand; PAM type: NRG; PAM sequence: TGG
cagaaattaggcaggtctgg

SEQ ID NO: 10101 - DNA, 20 bp, Artificial Sequence
  Description of Artificial Sequence: Synthetic oligonucleotide
  Target: ANGPTL4; (+) strand; PAM type: NRG; PAM sequence: TAG
ggtctggtggcacatgccta

SEQ ID NO: 10102 - DNA, 20 bp, Artificial Sequence
  Description of Artificial Sequence: Synthetic oligonucleotide
  Target: ANGPTL4; (+) strand; PAM type: NRG; PAM sequence: CAG
gtggcacatgcctatagtcc

SEQ ID NO: 10103 - DNA, 20 bp, Artificial Sequence
  Description of Artificial Sequence: Synthetic oligonucleotide
  Target: ANGPTL4; (+) strand; PAM type: NRG; PAM sequence: TGG
tgcctatagtcccagctgct

SEQ ID NO: 10104 - DNA, 20 bp, Artificial Sequence
  Description of Artificial Sequence: Synthetic oligonucleotide
  Target: ANGPTL4; (+) strand; PAM type: NRG; PAM sequence: GGG
gcctatagtcccagctgctt

SEQ ID NO: 10105 - DNA, 20 bp, Artificial Sequence
  Description of Artificial Sequence: Synthetic oligonucleotide
  Target: ANGPTL4; (+) strand; PAM type: NRG; PAM sequence: GAG
ctatagtcccagctgcttgg

SEQ ID NO: 10106 - DNA, 20 bp, Artificial Sequence
  Description of Artificial Sequence: Synthetic oligonucleotide
  Target: ANGPTL4; (+) strand; PAM type: NRG; PAM sequence: AGG
tatagtcccagctgcttggg

SEQ ID NO: 10107 - DNA, 20 bp, Artificial Sequence
  Description of Artificial Sequence: Synthetic oligonucleotide
  Target: ANGPTL4; (+) strand; PAM type: NRG; PAM sequence: GAG
tcccagctgcttgggaggct

SEQ ID NO: 10108 - DNA, 20 bp, Artificial Sequence
  Description of Artificial Sequence: Synthetic oligonucleotide
  Target: ANGPTL4; (+) strand; PAM type: NRG; PAM sequence: AGG
cccagctgcttgggaggctg

SEQ ID NO: 10109 - DNA, 20 bp, Artificial Sequence
  Description of Artificial Sequence: Synthetic oligonucleotide
  Target: ANGPTL4; (+) strand; PAM type: NRG; PAM sequence: TGG
agctgcttgggaggctgagg

SEQ ID NO: 10110 - DNA, 20 bp, Artificial Sequence
  Description of Artificial Sequence: Synthetic oligonucleotide
  Target: ANGPTL4; (+) strand; PAM type: NRG; PAM sequence: GGG
gctgcttgggaggctgaggt

SEQ ID NO: 10111 - DNA, 20 bp, Artificial Sequence
  Description of Artificial Sequence: Synthetic oligonucleotide
  Target: ANGPTL4; (+) strand; PAM type: NRG; PAM sequence: GAG
tgcttgggaggctgaggtgg

SEQ ID NO: 10112 - DNA, 20 bp, Artificial Sequence
  Description of Artificial Sequence: Synthetic oligonucleotide
  Target: ANGPTL4; (+) strand; PAM type: NRG; PAM sequence: AGG
gcttgggaggctgaggtggg

SEQ ID NO: 10113 - DNA, 20 bp, Artificial Sequence
  Description of Artificial Sequence: Synthetic oligonucleotide
  Target: ANGPTL4; (+) strand; PAM type: NRG; PAM sequence: GAG
ctgaggtgggaggatcactt

SEQ ID NO: 10114 - DNA, 20 bp, Artificial Sequence
  Description of Artificial Sequence: Synthetic oligonucleotide
  Target: ANGPTL4; (+) strand; PAM type: NRG; PAM sequence: TGG
gtgggaggatcacttgagcc

SEQ ID NO: 10115 - DNA, 20 bp, Artificial Sequence
  Description of Artificial Sequence: Synthetic oligonucleotide
  Target: ANGPTL4; (+) strand; PAM type: NRG; PAM sequence: GGG
tgggaggatcacttgagcct

SEQ ID NO: 10116 - DNA, 20 bp, Artificial Sequence
  Description of Artificial Sequence: Synthetic oligonucleotide
  Target: ANGPTL4; (+) strand; PAM type: NRG; PAM sequence: GAG
ggaggatcacttgagcctgg

SEQ ID NO: 10117 - DNA, 20 bp, Artificial Sequence
  Description of Artificial Sequence: Synthetic oligonucleotide
  Target: ANGPTL4; (+) strand; PAM type: NRG; PAM sequence: GAG
tcacttgagcctgggagttt

SEQ ID NO: 10118 - DNA, 20 bp, Artificial Sequence
  Description of Artificial Sequence: Synthetic oligonucleotide
  Target: ANGPTL4; (+) strand; PAM type: NRG; PAM sequence: AGG
cacttgagcctgggagtttg

SEQ ID NO: 10119 - DNA, 20 bp, Artificial Sequence
  Description of Artificial Sequence: Synthetic oligonucleotide
  Target: ANGPTL4; (+) strand; PAM type: NRG; PAM sequence: CGG
agcctgggagtttgaggttg

SEQ ID NO: 10120 - DNA, 20 bp, Artificial Sequence
  Description of Artificial Sequence: Synthetic oligonucleotide
  Target: ANGPTL4; (+) strand; PAM type: NRG; PAM sequence: GAG
tgggagtttgaggttgcggt

SEQ ID NO: 10121 - DNA, 20 bp, Artificial Sequence
  Description of Artificial Sequence: Synthetic oligonucleotide
  Target: ANGPTL4; (+) strand; PAM type: NRG; PAM sequence: CAG
gtgattgtgacactgcactc

SEQ ID NO: 10122 - DNA, 20 bp, Artificial Sequence
  Description of Artificial Sequence: Synthetic oligonucleotide
  Target: ANGPTL4; (+) strand; PAM type: NRG; PAM sequence: TGG
tgtgacactgcactccagcc

SEQ ID NO: 10123 - DNA, 20 bp, Artificial Sequence
  Description of Artificial Sequence: Synthetic oligonucleotide
  Target: ANGPTL4; (+) strand; PAM type: NRG; PAM sequence: GGG
gtgacactgcactccagcct

SEQ ID NO: 10124 - DNA, 20 bp, Artificial Sequence
  Description of Artificial Sequence: Synthetic oligonucleotide
  Target: ANGPTL4; (+) strand; PAM type: NRG; PAM sequence: GAG
cactgcactccagcctgggt

SEQ ID NO: 10125 - DNA, 20 bp, Artificial Sequence
  Description of Artificial Sequence: Synthetic oligonucleotide
  Target: ANGPTL4; (+) strand; PAM type: NRG; PAM sequence: GAG
gcactccagcctgggtgagt

SEQ ID NO: 10126 - DNA, 20 bp, Artificial Sequence
  Description of Artificial Sequence: Synthetic oligonucleotide
  Target: ANGPTL4; (+) strand; PAM type: NRG; PAM sequence: CAG
tgggtgagtgagacccatct

SEQ ID NO: 10127 - DNA, 20 bp, Artificial Sequence
  Description of Artificial Sequence: Synthetic oligonucleotide
  Target: ANGPTL4; (+) strand; PAM type: NRG; PAM sequence: CAG
aaaaaaaaaaatacataaaa

SEQ ID NO: 10128 - DNA, 20 bp, Artificial Sequence
  Description of Artificial Sequence: Synthetic oligonucleotide
  Target: ANGPTL4; (+) strand; PAM type: NRG; PAM sequence: AGG
aaaaaaaaaatacataaaac

SEQ ID NO: 10129 - DNA, 20 bp, Artificial Sequence
  Description of Artificial Sequence: Synthetic oligonucleotide
  Target: ANGPTL4; (+) strand; PAM type: NRG; PAM sequence: GGG
aaaaaaaaatacataaaaca

SEQ ID NO: 10130 - DNA, 20 bp, Artificial Sequence
  Description of Artificial Sequence: Synthetic oligonucleotide
  Target: ANGPTL4; (+) strand; PAM type: NRG; PAM sequence: TGG
aaaaatacataaaacagggc

SEQ ID NO: 10131 - DNA, 20 bp, Artificial Sequence
  Description of Artificial Sequence: Synthetic oligonucleotide
  Target: ANGPTL4; (+) strand; PAM type: NRG; PAM sequence: GGG
aaaatacataaaacagggct

SEQ ID NO: 10132 - DNA, 20 bp, Artificial Sequence
  Description of Artificial Sequence: Synthetic oligonucleotide
  Target: ANGPTL4; (+) strand; PAM type: NRG; PAM sequence: TGG
acataaaacagggctgggcg

SEQ ID NO: 10133 - DNA, 20 bp, Artificial Sequence
  Description of Artificial Sequence: Synthetic oligonucleotide
  Target: ANGPTL4; (+) strand; PAM type: NRG; PAM sequence: TGG
taaaacagggctgggcgtgg

SEQ ID NO: 10134 - DNA, 20 bp, Artificial Sequence
  Description of Artificial Sequence: Synthetic oligonucleotide
  Target: ANGPTL4; (+) strand; PAM type: NRG; PAM sequence: TAG
gtggctcatgcctgtaatcc

SEQ ID NO: 10135 - DNA, 20 bp, Artificial Sequence
  Description of Artificial Sequence: Synthetic oligonucleotide
  Target: ANGPTL4; (+) strand; PAM type: NRG; PAM sequence: TGG
tgcctgtaatcctagcactt

SEQ ID NO: 10136 - DNA, 20 bp, Artificial Sequence
  Description of Artificial Sequence: Synthetic oligonucleotide
  Target: ANGPTL4; (+) strand; PAM type: NRG; PAM sequence: GGG
gcctgtaatcctagcacttt

SEQ ID NO: 10137 - DNA, 20 bp, Artificial Sequence
  Description of Artificial Sequence: Synthetic oligonucleotide
  Target: ANGPTL4; (+) strand; PAM type: NRG; PAM sequence: GAG
ctgtaatcctagcactttgg

SEQ ID NO: 10138 - DNA, 20 bp, Artificial Sequence
  Description of Artificial Sequence: Synthetic oligonucleotide
  Target: ANGPTL4; (+) strand; PAM type: NRG; PAM sequence: AGG
tgtaatcctagcactttggg

SEQ ID NO: 10139 - DNA, 20 bp, Artificial Sequence
  Description of Artificial Sequence: Synthetic oligonucleotide
  Target: ANGPTL4; (+) strand; PAM type: NRG; PAM sequence: GAG
tcctagcactttgggaggct

SEQ ID NO: 10140 - DNA, 20 bp, Artificial Sequence
  Description of Artificial Sequence: Synthetic oligonucleotide
  Target: ANGPTL4; (+) strand; PAM type: NRG; PAM sequence: AGG
cctagcactttgggaggctg

SEQ ID NO: 10141 - DNA, 20 bp, Artificial Sequence
  Description of Artificial Sequence: Synthetic oligonucleotide
  Target: ANGPTL4; (+) strand; PAM type: NRG; PAM sequence: TGG
agcactttgggaggctgagg

SEQ ID NO: 10142 - DNA, 20 bp, Artificial Sequence
  Description of Artificial Sequence: Synthetic oligonucleotide
  Target: ANGPTL4; (+) strand; PAM type: NRG; PAM sequence: TGG
actttgggaggctgaggtgg

SEQ ID NO: 10143 - DNA, 20 bp, Artificial Sequence
  Description of Artificial Sequence: Synthetic oligonucleotide
  Target: ANGPTL4; (+) strand; PAM type: NRG; PAM sequence: TAG
tgggaggctgaggtggtgga

SEQ ID NO: 10144 - DNA, 20 bp, Artificial Sequence
  Description of Artificial Sequence: Synthetic oligonucleotide
  Target: ANGPTL4; (+) strand; PAM type: NRG; PAM sequence: AAG
gctgaggtggtggatagcct

SEQ ID NO: 10145 - DNA, 20 bp, Artificial Sequence
  Description of Artificial Sequence: Synthetic oligonucleotide
  Target: ANGPTL4; (+) strand; PAM type: NRG; PAM sequence: TAG
ggtggtggatagcctaagct

SEQ ID NO: 10146 - DNA, 20 bp, Artificial Sequence
  Description of Artificial Sequence: Synthetic oligonucleotide
  Target: ANGPTL4; (+) strand; PAM type: NRG; PAM sequence: AGG
gtggtggatagcctaagctt

SEQ ID NO: 10147 - DNA, 20 bp, Artificial Sequence
  Description of Artificial Sequence: Synthetic oligonucleotide
  Target: ANGPTL4; (+) strand; PAM type: NRG; PAM sequence: GAG
ggtggatagcctaagcttag

SEQ ID NO: 10148 - DNA, 20 bp, Artificial Sequence
  Description of Artificial Sequence: Synthetic oligonucleotide
  Target: ANGPTL4; (+) strand; PAM type: NRG; PAM sequence: GAG
tagcctaagcttaggagttt

SEQ ID NO: 10149 - DNA, 20 bp, Artificial Sequence
  Description of Artificial Sequence: Synthetic oligonucleotide
  Target: ANGPTL4; (+) strand; PAM type: NRG; PAM sequence: CAG
taagcttaggagtttgagac

SEQ ID NO: 10150 - DNA, 20 bp, Artificial Sequence
  Description of Artificial Sequence: Synthetic oligonucleotide
  Target: ANGPTL4; (+) strand; PAM type: NRG; PAM sequence: TGG
ttaggagtttgagaccagcc

SEQ ID NO: 10151 - DNA, 20 bp, Artificial Sequence
  Description of Artificial Sequence: Synthetic oligonucleotide
  Target: ANGPTL4; (+) strand; PAM type: NRG; PAM sequence: GGG
taggagtttgagaccagcct

SEQ ID NO: 10152 - DNA, 20 bp, Artificial Sequence
  Description of Artificial Sequence: Synthetic oligonucleotide
  Target: ANGPTL4; (+) strand; PAM type: NRG; PAM sequence: TGG
tgagaccagcctgggcaaca

SEQ ID NO: 10153 - DNA, 20 bp, Artificial Sequence
  Description of Artificial Sequence: Synthetic oligonucleotide
  Target: ANGPTL4; (+) strand; PAM type: NRG; PAM sequence: TAG
cgaaaccccaccccctctac

SEQ ID NO: 10154 - DNA, 20 bp, Artificial Sequence
  Description of Artificial Sequence: Synthetic oligonucleotide
  Target: ANGPTL4; (+) strand; PAM type: NRG; PAM sequence: TAG
tctactagaatacaaaaaat

SEQ ID NO: 10155 - DNA, 20 bp, Artificial Sequence
  Description of Artificial Sequence: Synthetic oligonucleotide
  Target: ANGPTL4; (+) strand; PAM type: NRG; PAM sequence: CGG
actagaatacaaaaaattag

SEQ ID NO: 10156 - DNA, 20 bp, Artificial Sequence
  Description of Artificial Sequence: Synthetic oligonucleotide
  Target: ANGPTL4; (+) strand; PAM type: NRG; PAM sequence: GGG
ctagaatacaaaaaattagc

SEQ ID NO: 10157 - DNA, 20 bp, Artificial Sequence
  Description of Artificial Sequence: Synthetic oligonucleotide
  Target: ANGPTL4; (+) strand; PAM type: NRG; PAM sequence: TGG
atacaaaaaattagcgggcg

SEQ ID NO: 10158 - DNA, 20 bp, Artificial Sequence
  Description of Artificial Sequence: Synthetic oligonucleotide
  Target: ANGPTL4; (+) strand; PAM type: NRG; PAM sequence: TGG
caaaaaattagcgggcgtgg

SEQ ID NO: 10159 - DNA, 20 bp, Artificial Sequence
  Description of Artificial Sequence: Synthetic oligonucleotide
  Target: ANGPTL4; (+) strand; PAM type: NRG; PAM sequence: TGG
aaaattagcgggcgtggtgg

SEQ ID NO: 10160 - DNA, 20 bp, Artificial Sequence
  Description of Artificial Sequence: Synthetic oligonucleotide
  Target: ANGPTL4; (+) strand; PAM type: NRG; PAM sequence: GGG
aaattagcgggcgtggtggt

SEQ ID NO: 10161 - DNA, 20 bp, Artificial Sequence
  Description of Artificial Sequence: Synthetic oligonucleotide
  Target: ANGPTL4; (+) strand; PAM type: NRG; PAM sequence: TAG
ggcgtggtggtgggcacctg

SEQ ID NO: 10162 - DNA, 20 bp, Artificial Sequence
  Description of Artificial Sequence: Synthetic oligonucleotide
  Target: ANGPTL4; (+) strand; PAM type: NRG; PAM sequence: CAG
gtggtgggcacctgtagtcc

SEQ ID NO: 10163 - DNA, 20 bp, Artificial Sequence
  Description of Artificial Sequence: Synthetic oligonucleotide
  Target: ANGPTL4; (+) strand; PAM type: NRG; PAM sequence: CAG
cacctgtagtcccagctact

SEQ ID NO: 10164 - DNA, 20 bp, Artificial Sequence
  Description of Artificial Sequence: Synthetic oligonucleotide
  Target: ANGPTL4; (+) strand; PAM type: NRG; PAM sequence: AGG
acctgtagtcccagctactc

SEQ ID NO: 10165 - DNA, 20 bp, Artificial Sequence
  Description of Artificial Sequence: Synthetic oligonucleotide
  Target: ANGPTL4; (+) strand; PAM type: NRG; PAM sequence: GAG
ctgtagtcccagctactcag

SEQ ID NO: 10166 - DNA, 20 bp, Artificial Sequence
  Description of Artificial Sequence: Synthetic oligonucleotide
  Target: ANGPTL4; (+) strand; PAM type: NRG; PAM sequence: AGG
tgtagtcccagctactcagg

SEQ ID NO: 10167 - DNA, 20 bp, Artificial Sequence
  Description of Artificial Sequence: Synthetic oligonucleotide
  Target: ANGPTL4; (+) strand; PAM type: NRG; PAM sequence: GAG
tcccagctactcaggaggct

SEQ ID NO: 10168 - DNA, 20 bp, Artificial Sequence
  Description of Artificial Sequence: Synthetic oligonucleotide
  Target: ANGPTL4; (+) strand; PAM type: NRG; PAM sequence: AGG
cccagctactcaggaggctg

SEQ ID NO: 10169 - DNA, 20 bp, Artificial Sequence
  Description of Artificial Sequence: Synthetic oligonucleotide
  Target: ANGPTL4; (+) strand; PAM type: NRG; PAM sequence: CAG
agctactcaggaggctgagg

SEQ ID NO: 10170 - DNA, 20 bp, Artificial Sequence
  Description of Artificial Sequence: Synthetic oligonucleotide
  Target: ANGPTL4; (+) strand; PAM type: NRG; PAM sequence: AGG
gctactcaggaggctgaggc

SEQ ID NO: 10171 - DNA, 20 bp, Artificial Sequence
  Description of Artificial Sequence: Synthetic oligonucleotide
  Target: ANGPTL4; (+) strand; PAM type: NRG; PAM sequence: GAG
tactcaggaggctgaggcag

SEQ ID NO: 10172 - DNA, 20 bp, Artificial Sequence
  Description of Artificial Sequence: Synthetic oligonucleotide
  Target: ANGPTL4; (+) strand; PAM type: NRG; PAM sequence: TGG
aggaggctgaggcaggagaa

SEQ ID NO: 10173 - DNA, 20 bp, Artificial Sequence
  Description of Artificial Sequence: Synthetic oligonucleotide
  Target: ANGPTL4; (+) strand; PAM type: NRG; PAM sequence: CGG
aggctgaggcaggagaatgg

SEQ ID NO: 10174 - DNA, 20 bp, Artificial Sequence
  Description of Artificial Sequence: Synthetic oligonucleotide
  Target: ANGPTL4; (+) strand; PAM type: NRG; PAM sequence: GGG
ggctgaggcaggagaatggc

SEQ ID NO: 10175 - DNA, 20 bp, Artificial Sequence
  Description of Artificial Sequence: Synthetic oligonucleotide
  Target: ANGPTL4; (+) strand; PAM type: NRG; PAM sequence: TGG
gcaggagaatggcgggaacc

SEQ ID NO: 10176 - DNA, 20 bp, Artificial Sequence
  Description of Artificial Sequence: Synthetic oligonucleotide
  Target: ANGPTL4; (+) strand; PAM type: NRG; PAM sequence: GGG
caggagaatggcgggaacct

SEQ ID NO: 10177 - DNA, 20 bp, Artificial Sequence
  Description of Artificial Sequence: Synthetic oligonucleotide
  Target: ANGPTL4; (+) strand; PAM type: NRG; PAM sequence: GAG
ggagaatggcgggaacctgg

SEQ ID NO: 10178 - DNA, 20 bp, Artificial Sequence
  Description of Artificial Sequence: Synthetic oligonucleotide
  Target: ANGPTL4; (+) strand; PAM type: NRG; PAM sequence: AGG
gagaatggcgggaacctggg

SEQ ID NO: 10179 - DNA, 20 bp, Artificial Sequence
  Description of Artificial Sequence: Synthetic oligonucleotide
  Target: ANGPTL4; (+) strand; PAM type: NRG; PAM sequence: TGG
aatggcgggaacctgggagg

SEQ ID NO: 10180 - DNA, 20 bp, Artificial Sequence
  Description of Artificial Sequence: Synthetic oligonucleotide
  Target: ANGPTL4; (+) strand; PAM type: NRG; PAM sequence: GAG
tggcgggaacctgggaggtg

SEQ ID NO: 10181 - DNA, 20 bp, Artificial Sequence
  Description of Artificial Sequence: Synthetic oligonucleotide
  Target: ANGPTL4; (+) strand; PAM type: NRG; PAM sequence: CAG
aacctgggaggtggagcttg

SEQ ID NO: 10182 - DNA, 20 bp, Artificial Sequence
  Description of Artificial Sequence: Synthetic oligonucleotide
  Target: ANGPTL4; (+) strand; PAM type: NRG; PAM sequence: GAG
tgggaggtggagcttgcagt

SEQ ID NO: 10183 - DNA, 20 bp, Artificial Sequence
  Description of Artificial Sequence: Synthetic oligonucleotide
  Target: ANGPTL4; (+) strand; PAM type: NRG; PAM sequence: GAG
ggtggagcttgcagtgagcc

SEQ ID NO: 10184 - DNA, 20 bp, Artificial Sequence
  Description of Artificial Sequence: Synthetic oligonucleotide
  Target: ANGPTL4; (+) strand; PAM type: NRG; PAM sequence: GAG
agcttgcagtgagccgagat

SEQ ID NO: 10185 - DNA, 20 bp, Artificial Sequence
  Description of Artificial Sequence: Synthetic oligonucleotide
  Target: ANGPTL4; (+) strand; PAM type: NRG; PAM sequence: AGG
gcttgcagtgagccgagatg

SEQ ID NO: 10186 - DNA, 20 bp, Artificial Sequence
  Description of Artificial Sequence: Synthetic oligonucleotide
  Target: ANGPTL4; (+) strand; PAM type: NRG; PAM sequence: CAG
gagatgaggccactgcactc

SEQ ID NO: 10187 - DNA, 20 bp, Artificial Sequence
  Description of Artificial Sequence: Synthetic oligonucleotide
  Target: ANGPTL4; (+) strand; PAM type: NRG; PAM sequence: TGG
gaggccactgcactccagcc

SEQ ID NO: 10188 - DNA, 20 bp, Artificial Sequence
  Description of Artificial Sequence: Synthetic oligonucleotide
  Target: ANGPTL4; (+) strand; PAM type: NRG; PAM sequence: GGG
aggccactgcactccagcct

SEQ ID NO: 10189 - DNA, 20 bp, Artificial Sequence
  Description of Artificial Sequence: Synthetic oligonucleotide
  Target: ANGPTL4; (+) strand; PAM type: NRG; PAM sequence: CAG
ctgcactccagcctgggcaa

SEQ ID NO: 10190 - DNA, 20 bp, Artificial Sequence
  Description of Artificial Sequence: Synthetic oligonucleotide
  Target: ANGPTL4; (+) strand; PAM type: NRG; PAM sequence: GAG
gcactccagcctgggcaaca

SEQ ID NO: 10191 - DNA, 20 bp, Artificial Sequence
  Description of Artificial Sequence: Synthetic oligonucleotide
  Target: ANGPTL4; (+) strand; PAM type: NRG; PAM sequence: AAG
tccagcctgggcaacagagc

SEQ ID NO: 10192 - DNA, 20 bp, Artificial Sequence
  Description of Artificial Sequence: Synthetic oligonucleotide
  Target: ANGPTL4; (+) strand; PAM type: NRG; PAM sequence: AAG
tcaaaaaaaaaaaaaaaaaa

SEQ ID NO: 10193 - DNA, 20 bp, Artificial Sequence
  Description of Artificial Sequence: Synthetic oligonucleotide
  Target: ANGPTL4; (+) strand; PAM type: NRG; PAM sequence: AGG
caaaaaaaaaaaaaaaaaaa

SEQ ID NO: 10194 - DNA, 20 bp, Artificial Sequence
  Description of Artificial Sequence: Synthetic oligonucleotide
  Target: ANGPTL4; (+) strand; PAM type: NRG; PAM sequence: TAG
aaaaaaaaaaaaaaaaaggc

SEQ ID NO: 10195 - DNA, 20 bp, Artificial Sequence
  Description of Artificial Sequence: Synthetic oligonucleotide
  Target: ANGPTL4; (+) strand; PAM type: NRG; PAM sequence: AGG
aaaaaaaaaaaaaaaaggct

SEQ ID NO: 10196 - DNA, 20 bp, Artificial Sequence
  Description of Artificial Sequence: Synthetic oligonucleotide
  Target: ANGPTL4; (+) strand; PAM type: NRG; PAM sequence: CAG
aaaaaaaaaaaaggctaggc

SEQ ID NO: 10197 - DNA, 20 bp, Artificial Sequence
  Description of Artificial Sequence: Synthetic oligonucleotide
  Target: ANGPTL4; (+) strand; PAM type: NRG; PAM sequence: AGG
aaaaaaaaaaaggctaggcc

SEQ ID NO: 10198 - DNA, 20 bp, Artificial Sequence
  Description of Artificial Sequence: Synthetic oligonucleotide
  Target: ANGPTL4; (+) strand; PAM type: NRG; PAM sequence: CAG
aaaaaaggctaggccaggca

SEQ ID NO: 10199 - DNA, 20 bp, Artificial Sequence
  Description of Artificial Sequence: Synthetic oligonucleotide
  Target: ANGPTL4; (+) strand; PAM type: NRG; PAM sequence: TGG
aaaggctaggccaggcacag

SEQ ID NO: 10200 - DNA, 20 bp, Artificial Sequence
  Description of Artificial Sequence: Synthetic oligonucleotide
  Target: ANGPTL4; (+) strand; PAM type: NRG; PAM sequence: CAG
gtggctcacacctgtaatcc

SEQ ID NO: 10201 - DNA, 20 bp, Artificial Sequence
  Description of Artificial Sequence: Synthetic oligonucleotide
  Target: ANGPTL4; (+) strand; PAM type: NRG; PAM sequence: TGG
cacctgtaatcccagcacgt

SEQ ID NO: 10202 - DNA, 20 bp, Artificial Sequence
  Description of Artificial Sequence: Synthetic oligonucleotide
  Target: ANGPTL4; (+) strand; PAM type: NRG; PAM sequence: GGG
acctgtaatcccagcacgtt

SEQ ID NO: 10203 - DNA, 20 bp, Artificial Sequence
  Description of Artificial Sequence: Synthetic oligonucleotide
  Target: ANGPTL4; (+) strand; PAM type: NRG; PAM sequence: GAG
ctgtaatcccagcacgttgg

SEQ ID NO: 10204 - DNA, 20 bp, Artificial Sequence
  Description of Artificial Sequence: Synthetic oligonucleotide
  Target: ANGPTL4; (+) strand; PAM type: NRG; PAM sequence: AGG
tgtaatcccagcacgttggg

SEQ ID NO: 10205 - DNA, 20 bp, Artificial Sequence
  Description of Artificial Sequence: Synthetic oligonucleotide
  Target: ANGPTL4; (+) strand; PAM type: NRG; PAM sequence: GAG
tcccagcacgttgggaggcc

SEQ ID NO: 10206 - DNA, 20 bp, Artificial Sequence
  Description of Artificial Sequence: Synthetic oligonucleotide
  Target: ANGPTL4; (+) strand; PAM type: NRG; PAM sequence: CAG
agcacgttgggaggccgaga

SEQ ID NO: 10207 - DNA, 20 bp, Artificial Sequence
  Description of Artificial Sequence: Synthetic oligonucleotide
  Target: ANGPTL4; (+) strand; PAM type: NRG; PAM sequence: AGG
gcacgttgggaggccgagac

SEQ ID NO: 10208 - DNA, 20 bp, Artificial Sequence
  Description of Artificial Sequence: Synthetic oligonucleotide
  Target: ANGPTL4; (+) strand; PAM type: NRG; PAM sequence: TGG
cgttgggaggccgagacagg

SEQ ID NO: 10209 - DNA, 20 bp, Artificial Sequence
  Description of Artificial Sequence: Synthetic oligonucleotide
  Target: ANGPTL4; (+) strand; PAM type: NRG; PAM sequence: GAG
ccgagacaggtggatcacct

SEQ ID NO: 10210 - DNA, 20 bp, Artificial Sequence
  Description of Artificial Sequence: Synthetic oligonucleotide
  Target: ANGPTL4; (+) strand; PAM type: NRG; PAM sequence: AGG
cgagacaggtggatcacctg

SEQ ID NO: 10211 - DNA, 20 bp, Artificial Sequence
  Description of Artificial Sequence: Synthetic oligonucleotide
  Target: ANGPTL4; (+) strand; PAM type: NRG; PAM sequence: CAG
acaggtggatcacctgaggt

SEQ ID NO: 10212 - DNA, 20 bp, Artificial Sequence
  Description of Artificial Sequence: Synthetic oligonucleotide
  Target: ANGPTL4; (+) strand; PAM type: NRG; PAM sequence: AGG
caggtggatcacctgaggtc

SEQ ID NO: 10213 - DNA, 20 bp, Artificial Sequence
  Description of Artificial Sequence: Synthetic oligonucleotide
  Target: ANGPTL4; (+) strand; PAM type: NRG; PAM sequence: GAG
tcacctgaggtcaggaattt

SEQ ID NO: 10214 - DNA, 20 bp, Artificial Sequence
  Description of Artificial Sequence: Synthetic oligonucleotide
  Target: ANGPTL4; (+) strand; PAM type: NRG; PAM sequence: CAG
tgaggtcaggaatttgagac

SEQ ID NO: 10215 - DNA, 20 bp, Artificial Sequence
  Description of Artificial Sequence: Synthetic oligonucleotide
  Target: ANGPTL4; (+) strand; PAM type: NRG; PAM sequence: CAG
ggtcaggaatttgagaccag

SEQ ID NO: 10216 - DNA, 20 bp, Artificial Sequence
  Description of Artificial Sequence: Synthetic oligonucleotide
  Target: ANGPTL4; (+) strand; PAM type: NRG; PAM sequence: GAG
tcaggaatttgagaccagca

SEQ ID NO: 10217 - DNA, 20 bp, Artificial Sequence
  Description of Artificial Sequence: Synthetic oligonucleotide
  Target: ANGPTL4; (+) strand; PAM type: NRG; PAM sequence: TAG
tgagaccagcagagccaaca

SEQ ID NO: 10218 - DNA, 20 bp, Artificial Sequence
  Description of Artificial Sequence: Synthetic oligonucleotide
  Target: ANGPTL4; (+) strand; PAM type: NRG; PAM sequence: TAG
gcactaaaaatacaaaaaat

SEQ ID NO: 10219 - DNA, 20 bp, Artificial Sequence
  Description of Artificial Sequence: Synthetic oligonucleotide
  Target: ANGPTL4; (+) strand; PAM type: NRG; PAM sequence: CAG
taaaaatacaaaaaattagt

SEQ ID NO: 10220 - DNA, 20 bp, Artificial Sequence
  Description of Artificial Sequence: Synthetic oligonucleotide
  Target: ANGPTL4; (+) strand; PAM type: NRG; PAM sequence: AGG
aaaaatacaaaaaattagtc

SEQ ID NO: 10221 - DNA, 20 bp, Artificial Sequence
  Description of Artificial Sequence: Synthetic oligonucleotide
  Target: ANGPTL4; (+) strand; PAM type: NRG; PAM sequence: TGG
tacaaaaaattagtcaggtg

SEQ ID NO: 10222 - DNA, 20 bp, Artificial Sequence
  Description of Artificial Sequence: Synthetic oligonucleotide
  Target: ANGPTL4; (+) strand; PAM type: NRG; PAM sequence: TGG
aaaaaattagtcaggtgtgg

SEQ ID NO: 10223 - DNA, 20 bp, Artificial Sequence
  Description of Artificial Sequence: Synthetic oligonucleotide
  Target: ANGPTL4; (+) strand; PAM type: NRG; PAM sequence: CGG
cacctgtaatccccgctact

SEQ ID NO: 10224 - DNA, 20 bp, Artificial Sequence
  Description of Artificial Sequence: Synthetic oligonucleotide
  Target: ANGPTL4; (+) strand; PAM type: NRG; PAM sequence: GGG
acctgtaatccccgctactc

SEQ ID NO: 10225 - DNA, 20 bp, Artificial Sequence
  Description of Artificial Sequence: Synthetic oligonucleotide
  Target: ANGPTL4; (+) strand; PAM type: NRG; PAM sequence: GAG
ctgtaatccccgctactcgg

SEQ ID NO: 10226 - DNA, 20 bp, Artificial Sequence
  Description of Artificial Sequence: Synthetic oligonucleotide
  Target: ANGPTL4; (+) strand; PAM type: NRG; PAM sequence: AGG
tgtaatccccgctactcggg

SEQ ID NO: 10227 - DNA, 20 bp, Artificial Sequence
  Description of Artificial Sequence: Synthetic oligonucleotide
  Target: ANGPTL4; (+) strand; PAM type: NRG; PAM sequence: GAG
tccccgctactcgggaggct

SEQ ID NO: 10228 - DNA, 20 bp, Artificial Sequence
  Description of Artificial Sequence: Synthetic oligonucleotide
  Target: ANGPTL4; (+) strand; PAM type: NRG; PAM sequence: AGG
ccccgctactcgggaggctg

SEQ ID NO: 10229 - DNA, 20 bp, Artificial Sequence
  Description of Artificial Sequence: Synthetic oligonucleotide
  Target: ANGPTL4; (+) strand; PAM type: NRG; PAM sequence: TGG
gctactcgggaggctgaggc

SEQ ID NO: 10230 - DNA, 20 bp, Artificial Sequence
  Description of Artificial Sequence: Synthetic oligonucleotide
  Target: ANGPTL4; (+) strand; PAM type: NRG; PAM sequence: GAG
tactcgggaggctgaggctg

SEQ ID NO: 10231 - DNA, 20 bp, Artificial Sequence
  Description of Artificial Sequence: Synthetic oligonucleotide
  Target: ANGPTL4; (+) strand; PAM type: NRG; PAM sequence: TGG
gctggagaatcgcttgaacc

SEQ ID NO: 10232 - DNA, 20 bp, Artificial Sequence
  Description of Artificial Sequence: Synthetic oligonucleotide
  Target: ANGPTL4; (+) strand; PAM type: NRG; PAM sequence: GGG
ctggagaatcgcttgaacct

SEQ ID NO: 10233 - DNA, 20 bp, Artificial Sequence
  Description of Artificial Sequence: Synthetic oligonucleotide
  Target: ANGPTL4; (+) strand; PAM type: NRG; PAM sequence: GAG
ggagaatcgcttgaacctgg

SEQ ID NO: 10234 - DNA, 20 bp, Artificial Sequence
  Description of Artificial Sequence: Synthetic oligonucleotide
  Target: ANGPTL4; (+) strand; PAM type: NRG; PAM sequence: AGG
gagaatcgcttgaacctggg

SEQ ID NO: 10235 - DNA, 20 bp, Artificial Sequence
  Description of Artificial Sequence: Synthetic oligonucleotide
  Target: ANGPTL4; (+) strand; PAM type: NRG; PAM sequence: CAG
aatcgcttgaacctgggagg

SEQ ID NO: 10236 - DNA, 20 bp, Artificial Sequence
  Description of Artificial Sequence: Synthetic oligonucleotide
  Target: ANGPTL4; (+) strand; PAM type: NRG; PAM sequence: GAG
tcgcttgaacctgggaggca

SEQ ID NO: 10237 - DNA, 20 bp, Artificial Sequence
  Description of Artificial Sequence: Synthetic oligonucleotide
  Target: ANGPTL4; (+) strand; PAM type: NRG; PAM sequence: AGG
cgcttgaacctgggaggcag

SEQ ID NO: 10238 - DNA, 20 bp, Artificial Sequence
  Description of Artificial Sequence: Synthetic oligonucleotide
  Target: ANGPTL4; (+) strand; PAM type: NRG; PAM sequence: CAG
aacctgggaggcagaggttg

SEQ ID NO: 10239 - DNA, 20 bp, Artificial Sequence
  Description of Artificial Sequence: Synthetic oligonucleotide
  Target: ANGPTL4; (+) strand; PAM type: NRG; PAM sequence: GAG
tgggaggcagaggttgcagt

SEQ ID NO: 10240 - DNA, 20 bp, Artificial Sequence
  Description of Artificial Sequence: Synthetic oligonucleotide
  Target: ANGPTL4; (+) strand; PAM type: NRG; PAM sequence: CGG
gaggcagaggttgcagtgag

SEQ ID NO: 10241 - DNA, 20 bp, Artificial Sequence
  Description of Artificial Sequence: Synthetic oligonucleotide
  Target: ANGPTL4; (+) strand; PAM type: NRG; PAM sequence: GAG
ggcagaggttgcagtgagcg

SEQ ID NO: 10242 - DNA, 20 bp, Artificial Sequence
  Description of Artificial Sequence: Synthetic oligonucleotide
  Target: ANGPTL4; (+) strand; PAM type: NRG; PAM sequence: CAG
gagattgcgccgttgcactc

SEQ ID NO: 10243 - DNA, 20 bp, Artificial Sequence
  Description of Artificial Sequence: Synthetic oligonucleotide
  Target: ANGPTL4; (+) strand; PAM type: NRG; PAM sequence: TGG
tgcgccgttgcactccagcc

SEQ ID NO: 10244 - DNA, 20 bp, Artificial Sequence
  Description of Artificial Sequence: Synthetic oligonucleotide
  Target: ANGPTL4; (+) strand; PAM type: NRG; PAM sequence: GGG
gcgccgttgcactccagcct

SEQ ID NO: 10245 - DNA, 20 bp, Artificial Sequence
  Description of Artificial Sequence: Synthetic oligonucleotide
  Target: ANGPTL4; (+) strand; PAM type: NRG; PAM sequence: AAG
tgcactccagcctgggcgac

SEQ ID NO: 10246 - DNA, 20 bp, Artificial Sequence
  Description of Artificial Sequence: Synthetic oligonucleotide
  Target: ANGPTL4; (+) strand; PAM type: NRG; PAM sequence: GAG
cactccagcctgggcgacaa

SEQ ID NO: 10247 - DNA, 20 bp, Artificial Sequence
  Description of Artificial Sequence: Synthetic oligonucleotide
  Target: ANGPTL4; (+) strand; PAM type: NRG; PAM sequence: AGG
actccagcctgggcgacaag

SEQ ID NO: 10248 - DNA, 20 bp, Artificial Sequence
  Description of Artificial Sequence: Synthetic oligonucleotide
  Target: ANGPTL4; (+) strand; PAM type: NRG; PAM sequence: GGG
ctccagcctgggcgacaaga

SEQ ID NO: 10249 - DNA, 20 bp, Artificial Sequence
  Description of Artificial Sequence: Synthetic oligonucleotide
  Target: ANGPTL4; (+) strand; PAM type: NRG; PAM sequence: TAG
taaataaataaaataaaaaa

SEQ ID NO: 10250 - DNA, 20 bp, Artificial Sequence
  Description of Artificial Sequence: Synthetic oligonucleotide
  Target: ANGPTL4; (+) strand; PAM type: NRG; PAM sequence: AGG
aaataaataaaataaaaaat

SEQ ID NO: 10251 - DNA, 20 bp, Artificial Sequence
  Description of Artificial Sequence: Synthetic oligonucleotide
  Target: ANGPTL4; (+) strand; PAM type: NRG; PAM sequence: TGG
aaataaaataaaaaataggc

SEQ ID NO: 10252 - DNA, 20 bp, Artificial Sequence
  Description of Artificial Sequence: Synthetic oligonucleotide
  Target: ANGPTL4; (+) strand; PAM type: NRG; PAM sequence: GGG
aataaaataaaaaataggct

SEQ ID NO: 10253 - DNA, 20 bp, Artificial Sequence
  Description of Artificial Sequence: Synthetic oligonucleotide
  Target: ANGPTL4; (+) strand; PAM type: NRG; PAM sequence: CGG
aataaaaaataggctgggcg

SEQ ID NO: 10254 - DNA, 20 bp, Artificial Sequence
  Description of Artificial Sequence: Synthetic oligonucleotide
  Target: ANGPTL4; (+) strand; PAM type: NRG; PAM sequence: TGG
aaaaaataggctgggcgcgg

SEQ ID NO: 10255 - DNA, 20 bp, Artificial Sequence
  Description of Artificial Sequence: Synthetic oligonucleotide
  Target: ANGPTL4; (+) strand; PAM type: NRG; PAM sequence: CAG
gtggctcatgcctgtaatcc

SEQ ID NO: 10256 - DNA, 20 bp, Artificial Sequence
  Description of Artificial Sequence: Synthetic oligonucleotide
  Target: ANGPTL4; (+) strand; PAM type: NRG; PAM sequence: TGG
tgcctgtaatcccagcactt

SEQ ID NO: 10257 - DNA, 20 bp, Artificial Sequence
  Description of Artificial Sequence: Synthetic oligonucleotide
  Target: ANGPTL4; (+) strand; PAM type: NRG; PAM sequence: GGG
gcctgtaatcccagcacttt

SEQ ID NO: 10258 - DNA, 20 bp, Artificial Sequence
  Description of Artificial Sequence: Synthetic oligonucleotide
  Target: ANGPTL4; (+) strand; PAM type: NRG; PAM sequence: GAG
ctgtaatcccagcactttgg

SEQ ID NO: 10259 - DNA, 20 bp, Artificial Sequence
  Description of Artificial Sequence: Synthetic oligonucleotide
  Target: ANGPTL4; (+) strand; PAM type: NRG; PAM sequence: AGG
tgtaatcccagcactttggg

SEQ ID NO: 10260 - DNA, 20 bp, Artificial Sequence
  Description of Artificial Sequence: Synthetic oligonucleotide
  Target: ANGPTL4; (+) strand; PAM type: NRG; PAM sequence: AAG
cccagcactttgggaggccg

SEQ ID NO: 10261 - DNA, 20 bp, Artificial Sequence
  Description of Artificial Sequence: Synthetic oligonucleotide
  Target: ANGPTL4; (+) strand; PAM type: NRG; PAM sequence: CGG
agcactttgggaggccgaag

SEQ ID NO: 10262 - DNA, 20 bp, Artificial Sequence
  Description of Artificial Sequence: Synthetic oligonucleotide
  Target: ANGPTL4; (+) strand; PAM type: NRG; PAM sequence: GGG
gcactttgggaggccgaagc

SEQ ID NO: 10263 - DNA, 20 bp, Artificial Sequence
  Description of Artificial Sequence: Synthetic oligonucleotide
  Target: ANGPTL4; (+) strand; PAM type: NRG; PAM sequence: CGG
ctttgggaggccgaagcggg

SEQ ID NO: 10264 - DNA, 20 bp, Artificial Sequence
  Description of Artificial Sequence: Synthetic oligonucleotide
  Target: ANGPTL4; (+) strand; PAM type: NRG; PAM sequence: GAG
ggccgaagcgggcggatcac

SEQ ID NO: 10265 - DNA, 20 bp, Artificial Sequence
  Description of Artificial Sequence: Synthetic oligonucleotide
  Target: ANGPTL4; (+) strand; PAM type: NRG; PAM sequence: AGG
gccgaagcgggcggatcacg

SEQ ID NO: 10266 - DNA, 20 bp, Artificial Sequence
  Description of Artificial Sequence: Synthetic oligonucleotide
  Target: ANGPTL4; (+) strand; PAM type: NRG; PAM sequence: CAG
aagcgggcggatcacgaggt

SEQ ID NO: 10267 - DNA, 20 bp, Artificial Sequence
  Description of Artificial Sequence: Synthetic oligonucleotide
  Target: ANGPTL4; (+) strand; PAM type: NRG; PAM sequence: AGG
agcgggcggatcacgaggtc

SEQ ID NO: 10268 - DNA, 20 bp, Artificial Sequence
  Description of Artificial Sequence: Synthetic oligonucleotide
  Target: ANGPTL4; (+) strand; PAM type: NRG; PAM sequence: GAG
cgggcggatcacgaggtcag

SEQ ID NO: 10269 - DNA, 20 bp, Artificial Sequence
  Description of Artificial Sequence: Synthetic oligonucleotide
  Target: ANGPTL4; (+) strand; PAM type: NRG; PAM sequence: GAG
gatcacgaggtcaggagatc

SEQ ID NO: 10270 - DNA, 20 bp, Artificial Sequence
  Description of Artificial Sequence: Synthetic oligonucleotide
  Target: ANGPTL4; (+) strand; PAM type: NRG; PAM sequence: TGG
tcaggagatcgagaccatcc

SEQ ID NO: 10271 - DNA, 20 bp, Artificial Sequence
  Description of Artificial Sequence: Synthetic oligonucleotide
  Target: ANGPTL4; (+) strand; PAM type: NRG; PAM sequence: TGG
cgagaccatcctggctaaca

SEQ ID NO: 10272 - DNA, 20 bp, Artificial Sequence
  Description of Artificial Sequence: Synthetic oligonucleotide
  Target: ANGPTL4; (+) strand; PAM type: NRG; PAM sequence: TAG
ctattaaaaatacaaaaaat

SEQ ID NO: 10273 - DNA, 20 bp, Artificial Sequence
  Description of Artificial Sequence: Synthetic oligonucleotide
  Target: ANGPTL4; (+) strand; PAM type: NRG; PAM sequence: TGG
taaaaatacaaaaaattagc

SEQ ID NO: 10274 - DNA, 20 bp, Artificial Sequence
  Description of Artificial Sequence: Synthetic oligonucleotide
  Target: ANGPTL4; (+) strand; PAM type: NRG; PAM sequence: GGG
aaaaatacaaaaaattagct

SEQ ID NO: 10275 - DNA, 20 bp, Artificial Sequence
  Description of Artificial Sequence: Synthetic oligonucleotide
  Target: ANGPTL4; (+) strand; PAM type: NRG; PAM sequence: TGG
tacaaaaaattagctgggca

SEQ ID NO: 10276 - DNA, 20 bp, Artificial Sequence
  Description of Artificial Sequence: Synthetic oligonucleotide
  Target: ANGPTL4; (+) strand; PAM type: NRG; PAM sequence: TGG
aaaaaattagctgggcatgg

SEQ ID NO: 10277 - DNA, 20 bp, Artificial Sequence
  Description of Artificial Sequence: Synthetic oligonucleotide
  Target: ANGPTL4; (+) strand; PAM type: NRG; PAM sequence: CAG
aaattagctgggcatggtgg

SEQ ID NO: 10278 - DNA, 20 bp, Artificial Sequence
  Description of Artificial Sequence: Synthetic oligonucleotide
  Target: ANGPTL4; (+) strand; PAM type: NRG; PAM sequence: AGG
aattagctgggcatggtggc

SEQ ID NO: 10279 - DNA, 20 bp, Artificial Sequence
  Description of Artificial Sequence: Synthetic oligonucleotide
  Target: ANGPTL4; (+) strand; PAM type: NRG; PAM sequence: TAG
ggcatggtggcaggtgcctg

SEQ ID NO: 10280 - DNA, 20 bp, Artificial Sequence
  Description of Artificial Sequence: Synthetic oligonucleotide
  Target: ANGPTL4; (+) strand; PAM type: NRG; PAM sequence: CAG
gtggcaggtgcctgtagtcc

SEQ ID NO: 10281 - DNA, 20 bp, Artificial Sequence
  Description of Artificial Sequence: Synthetic oligonucleotide
  Target: ANGPTL4; (+) strand; PAM type: NRG; PAM sequence: CGG
tgcctgtagtcccagctact

SEQ ID NO: 10282 - DNA, 20 bp, Artificial Sequence
  Description of Artificial Sequence: Synthetic oligonucleotide
  Target: ANGPTL4; (+) strand; PAM type: NRG; PAM sequence: GGG
gcctgtagtcccagctactc

SEQ ID NO: 10283 - DNA, 20 bp, Artificial Sequence
  Description of Artificial Sequence: Synthetic oligonucleotide
  Target: ANGPTL4; (+) strand; PAM type: NRG; PAM sequence: GAG
ctgtagtcccagctactcgg

SEQ ID NO: 10284 - DNA, 20 bp, Artificial Sequence
  Description of Artificial Sequence: Synthetic oligonucleotide
  Target: ANGPTL4; (+) strand; PAM type: NRG; PAM sequence: AGG
tgtagtcccagctactcggg

SEQ ID NO: 10285 - DNA, 20 bp, Artificial Sequence
  Description of Artificial Sequence: Synthetic oligonucleotide
  Target: ANGPTL4; (+) strand; PAM type: NRG; PAM sequence: GAG
tcccagctactcgggaggct

SEQ ID NO: 10286 - DNA, 20 bp, Artificial Sequence
  Description of Artificial Sequence: Synthetic oligonucleotide
  Target: ANGPTL4; (+) strand; PAM type: NRG; PAM sequence: AGG
cccagctactcgggaggctg

SEQ ID NO: 10287 - DNA, 20 bp, Artificial Sequence
  Description of Artificial Sequence: Synthetic oligonucleotide
  Target: ANGPTL4; (+) strand; PAM type: NRG; PAM sequence: CAG
agctactcgggaggctgagg

SEQ ID NO: 10288 - DNA, 20 bp, Artificial Sequence
  Description of Artificial Sequence: Synthetic oligonucleotide
  Target: ANGPTL4; (+) strand; PAM type: NRG; PAM sequence: AGG
gctactcgggaggctgaggc

SEQ ID NO: 10289 - DNA, 20 bp, Artificial Sequence
  Description of Artificial Sequence: Synthetic oligonucleotide
  Target: ANGPTL4; (+) strand; PAM type: NRG; PAM sequence: GAG
tactcgggaggctgaggcag

SEQ ID NO: 10290 - DNA, 20 bp, Artificial Sequence
  Description of Artificial Sequence: Synthetic oligonucleotide
  Target: ANGPTL4; (+) strand; PAM type: NRG; PAM sequence: TGG
gggaggctgaggcaggagaa

SEQ ID NO: 10291 - DNA, 20 bp, Artificial Sequence
  Description of Artificial Sequence: Synthetic oligonucleotide
  Target: ANGPTL4; (+) strand; PAM type: NRG; PAM sequence: CGG
gcaggagaatggcactaacc

SEQ ID NO: 10292 - DNA, 20 bp, Artificial Sequence
  Description of Artificial Sequence: Synthetic oligonucleotide
  Target: ANGPTL4; (+) strand; PAM type: NRG; PAM sequence: GGG
caggagaatggcactaaccc

SEQ ID NO: 10293 - DNA, 20 bp, Artificial Sequence
  Description of Artificial Sequence: Synthetic oligonucleotide
  Target: ANGPTL4; (+) strand; PAM type: NRG; PAM sequence: GAG
ggagaatggcactaacccgg

SEQ ID NO: 10294 - DNA, 20 bp, Artificial Sequence
  Description of Artificial Sequence: Synthetic oligonucleotide
  Target: ANGPTL4; (+) strand; PAM type: NRG; PAM sequence: AGG
gagaatggcactaacccggg

SEQ ID NO: 10295 - DNA, 20 bp, Artificial Sequence
  Description of Artificial Sequence: Synthetic oligonucleotide
  Target: ANGPTL4; (+) strand; PAM type: NRG; PAM sequence: TGG
aatggcactaacccgggagg

SEQ ID NO: 10296 - DNA, 20 bp, Artificial Sequence
  Description of Artificial Sequence: Synthetic oligonucleotide
  Target: ANGPTL4; (+) strand; PAM type: NRG; PAM sequence: GAG
tggcactaacccgggaggtg

SEQ ID NO: 10297 - DNA, 20 bp, Artificial Sequence
  Description of Artificial Sequence: Synthetic oligonucleotide
  Target: ANGPTL4; (+) strand; PAM type: NRG; PAM sequence: CAG
aacccgggaggtggagcttg

SEQ ID NO: 10298 - DNA, 20 bp, Artificial Sequence
  Description of Artificial Sequence: Synthetic oligonucleotide
  Target: ANGPTL4; (+) strand; PAM type: NRG; PAM sequence: GAG
cgggaggtggagcttgcagt

SEQ ID NO: 10299 - DNA, 20 bp, Artificial Sequence
  Description of Artificial Sequence: Synthetic oligonucleotide
  Target: ANGPTL4; (+) strand; PAM type: NRG; PAM sequence: GAG
ggtggagcttgcagtgagcc

SEQ ID NO: 10300 - DNA, 20 bp, Artificial Sequence
  Description of Artificial Sequence: Synthetic oligonucleotide
  Target: ANGPTL4; (+) strand; PAM type: NRG; PAM sequence: CAG
gagattgcgccactgcactc

SEQ ID NO: 10301 - DNA, 20 bp, Artificial Sequence
  Description of Artificial Sequence: Synthetic oligonucleotide
  Target: ANGPTL4; (+) strand; PAM type: NRG; PAM sequence: TGG
tgcgccactgcactccagcg

SEQ ID NO: 10302 - DNA, 20 bp, Artificial Sequence
  Description of Artificial Sequence: Synthetic oligonucleotide
  Target: ANGPTL4; (+) strand; PAM type: NRG; PAM sequence: GGG
gcgccactgcactccagcgt

SEQ ID NO: 10303 - DNA, 20 bp, Artificial Sequence
  Description of Artificial Sequence: Synthetic oligonucleotide
  Target: ANGPTL4; (+) strand; PAM type: NRG; PAM sequence: CAG
ctgcactccagcgtgggcga

SEQ ID NO: 10304 - DNA, 20 bp, Artificial Sequence
  Description of Artificial Sequence: Synthetic oligonucleotide
  Target: ANGPTL4; (+) strand; PAM type: NRG; PAM sequence: GAG
gcactccagcgtgggcgaca

SEQ ID NO: 10305 - DNA, 20 bp, Artificial Sequence
  Description of Artificial Sequence: Synthetic oligonucleotide
  Target: ANGPTL4; (+) strand; PAM type: NRG; PAM sequence: GAG
tccagcgtgggcgacagagc

SEQ ID NO: 10306 - DNA, 20 bp, Artificial Sequence
  Description of Artificial Sequence: Synthetic oligonucleotide
  Target: ANGPTL4; (+) strand; PAM type: NRG; PAM sequence: AAG
aaataaataaataaaaaata

SEQ ID NO: 10307 - DNA, 20 bp, Artificial Sequence
  Description of Artificial Sequence: Synthetic oligonucleotide
  Target: ANGPTL4; (+) strand; PAM type: NRG; PAM sequence: GAG
ataaataaataaaaaataaa

SEQ ID NO: 10308 - DNA, 20 bp, Artificial Sequence
  Description of Artificial Sequence: Synthetic oligonucleotide
  Target: ANGPTL4; (+) strand; PAM type: NRG; PAM sequence: CAG
aataaataaaaaataaagag

SEQ ID NO: 10309 - DNA, 20 bp, Artificial Sequence
  Description of Artificial Sequence: Synthetic oligonucleotide
  Target: ANGPTL4; (+) strand; PAM type: NRG; PAM sequence: TAG
aaaaaataaagagcagtttt

SEQ ID NO: 10310 - DNA, 20 bp, Artificial Sequence
  Description of Artificial Sequence: Synthetic oligonucleotide
  Target: ANGPTL4; (+) strand; PAM type: NRG; PAM sequence: TAG
gcagtttttagaataaaatc

SEQ ID NO: 10311 - DNA, 20 bp, Artificial Sequence
  Description of Artificial Sequence: Synthetic oligonucleotide
  Target: ANGPTL4; (+) strand; PAM type: NRG; PAM sequence: GAG
agtttttagaataaaatcta

SEQ ID NO: 10312 - DNA, 20 bp, Artificial Sequence
  Description of Artificial Sequence: Synthetic oligonucleotide
  Target: ANGPTL4; (+) strand; PAM type: NRG; PAM sequence: GAG
ataaaatctagagccaactt

SEQ ID NO: 10313 - DNA, 20 bp, Artificial Sequence
  Description of Artificial Sequence: Synthetic oligonucleotide
  Target: ANGPTL4; (+) strand; PAM type: NRG; PAM sequence: AGG
taaaatctagagccaacttg

SEQ ID NO: 10314 - DNA, 20 bp, Artificial Sequence
  Description of Artificial Sequence: Synthetic oligonucleotide
  Target: ANGPTL4; (+) strand; PAM type: NRG; PAM sequence: CAG
ctagagccaacttgaggcga

SEQ ID NO: 10315 - DNA, 20 bp, Artificial Sequence
  Description of Artificial Sequence: Synthetic oligonucleotide
  Target: ANGPTL4; (+) strand; PAM type: NRG; PAM sequence: TAG
gccaacttgaggcgacagta

SEQ ID NO: 10316 - DNA, 20 bp, Artificial Sequence
  Description of Artificial Sequence: Synthetic oligonucleotide
  Target: ANGPTL4; (+) strand; PAM type: NRG; PAM sequence: TAG
cgacagtatagactcttttg

SEQ ID NO: 10317 - DNA, 20 bp, Artificial Sequence
  Description of Artificial Sequence: Synthetic oligonucleotide
  Target: ANGPTL4; (+) strand; PAM type: NRG; PAM sequence: CAG
actcttttgtagattgctca

SEQ ID NO: 10318 - DNA, 20 bp, Artificial Sequence
  Description of Artificial Sequence: Synthetic oligonucleotide
  Target: ANGPTL4; (+) strand; PAM type: NRG; PAM sequence: CAG
cttttgtagattgctcacag

SEQ ID NO: 10319 - DNA, 20 bp, Artificial Sequence
  Description of Artificial Sequence: Synthetic oligonucleotide
  Target: ANGPTL4; (+) strand; PAM type: NRG; PAM sequence: AGG
ttttgtagattgctcacagc

SEQ ID NO: 10320 - DNA, 20 bp, Artificial Sequence
  Description of Artificial Sequence: Synthetic oligonucleotide
  Target: ANGPTL4; (+) strand; PAM type: NRG; PAM sequence: AAG
tgctcacagcaggtgccctt

SEQ ID NO: 10321 - DNA, 20 bp, Artificial Sequence
  Description of Artificial Sequence: Synthetic oligonucleotide
  Target: ANGPTL4; (+) strand; PAM type: NRG; PAM sequence: TGG
agcaggtgcccttaagaccc

SEQ ID NO: 10322 - DNA, 20 bp, Artificial Sequence
  Description of Artificial Sequence: Synthetic oligonucleotide
  Target: ANGPTL4; (+) strand; PAM type: NRG; PAM sequence: GGG
gcaggtgcccttaagaccct

SEQ ID NO: 10323 - DNA, 20 bp, Artificial Sequence
  Description of Artificial Sequence: Synthetic oligonucleotide
  Target: ANGPTL4; (+) strand; PAM type: NRG; PAM sequence: TGG
ctgtgatgtgttttgtgctg

SEQ ID NO: 10324 - DNA, 20 bp, Artificial Sequence
  Description of Artificial Sequence: Synthetic oligonucleotide
  Target: ANGPTL4; (+) strand; PAM type: NRG; PAM sequence: GGG
tgtgatgtgttttgtgctgt

SEQ ID NO: 10325 - DNA, 20 bp, Artificial Sequence
  Description of Artificial Sequence: Synthetic oligonucleotide
  Target: ANGPTL4; (+) strand; PAM type: NRG; PAM sequence: TGG
gttttgtgctgtgggacaca

SEQ ID NO: 10326 - DNA, 20 bp, Artificial Sequence
  Description of Artificial Sequence: Synthetic oligonucleotide
  Target: ANGPTL4; (+) strand; PAM type: NRG; PAM sequence: AAG
ctgtgggacacatggctcca

SEQ ID NO: 10327 - DNA, 20 bp, Artificial Sequence
  Description of Artificial Sequence: Synthetic oligonucleotide
  Target: ANGPTL4; (+) strand; PAM type: NRG; PAM sequence: AAG
tgggacacatggctccaaag

SEQ ID NO: 10328 - DNA, 20 bp, Artificial Sequence
  Description of Artificial Sequence: Synthetic oligonucleotide
  Target: ANGPTL4; (+) strand; PAM type: NRG; PAM sequence: CAG
ccaaagaagtccctgaaaat

SEQ ID NO: 10329 - DNA, 20 bp, Artificial Sequence
  Description of Artificial Sequence: Synthetic oligonucleotide
  Target: ANGPTL4; (+) strand; PAM type: NRG; PAM sequence: AAG
cctgaaaatcagatcatgaa

SEQ ID NO: 10330 - DNA, 20 bp, Artificial Sequence
  Description of Artificial Sequence: Synthetic oligonucleotide
  Target: ANGPTL4; (+) strand; PAM type: NRG; PAM sequence: AGG
ctgaaaatcagatcatgaaa

SEQ ID NO: 10331 - DNA, 20 bp, Artificial Sequence
  Description of Artificial Sequence: Synthetic oligonucleotide
  Target: ANGPTL4; (+) strand; PAM type: NRG; PAM sequence: CAG
tcagatcatgaaaaggtcat

SEQ ID NO: 10332 - DNA, 20 bp, Artificial Sequence
  Description of Artificial Sequence: Synthetic oligonucleotide
  Target: ANGPTL4; (+) strand; PAM type: NRG; PAM sequence: AGG
cagatcatgaaaaggtcatc

SEQ ID NO: 10333 - DNA, 20 bp, Artificial Sequence
  Description of Artificial Sequence: Synthetic oligonucleotide
  Target: ANGPTL4; (+) strand; PAM type: NRG; PAM sequence: TGG
tcatgaaaaggtcatcaggt

SEQ ID NO: 10334 - DNA, 20 bp, Artificial Sequence
  Description of Artificial Sequence: Synthetic oligonucleotide
  Target: ANGPTL4; (+) strand; PAM type: NRG; PAM sequence: GGG
catgaaaaggtcatcaggtt

SEQ ID NO: 10335 - DNA, 20 bp, Artificial Sequence
  Description of Artificial Sequence: Synthetic oligonucleotide
  Target: ANGPTL4; (+) strand; PAM type: NRG; PAM sequence: GGG
atgaaaaggtcatcaggttg

SEQ ID NO: 10336 - DNA, 20 bp, Artificial Sequence
  Description of Artificial Sequence: Synthetic oligonucleotide
  Target: ANGPTL4; (+) strand; PAM type: NRG; PAM sequence: AAG
aaaaggtcatcaggttgggg

SEQ ID NO: 10337 - DNA, 20 bp, Artificial Sequence
  Description of Artificial Sequence: Synthetic oligonucleotide
  Target: ANGPTL4; (+) strand; PAM type: NRG; PAM sequence: CAG
aggttggggaagtaattgat

SEQ ID NO: 10338 - DNA, 20 bp, Artificial Sequence
  Description of Artificial Sequence: Synthetic oligonucleotide
  Target: ANGPTL4; (+) strand; PAM type: NRG; PAM sequence: CAG
aagtaattgatcagttctct

SEQ ID NO: 10339 - DNA, 20 bp, Artificial Sequence
  Description of Artificial Sequence: Synthetic oligonucleotide
  Target: ANGPTL4; (+) strand; PAM type: NRG; PAM sequence: AAG
ttgatcagttctctcagttt

SEQ ID NO: 10340 - DNA, 20 bp, Artificial Sequence
  Description of Artificial Sequence: Synthetic oligonucleotide
  Target: ANGPTL4; (+) strand; PAM type: NRG; PAM sequence: AAG
atcagttctctcagtttaag

SEQ ID NO: 10341 - DNA, 20 bp, Artificial Sequence
  Description of Artificial Sequence: Synthetic oligonucleotide
  Target: ANGPTL4; (+) strand; PAM type: NRG; PAM sequence: AGG
tcagttctctcagtttaaga

SEQ ID NO: 10342 - DNA, 20 bp, Artificial Sequence
  Description of Artificial Sequence: Synthetic oligonucleotide
  Target: ANGPTL4; (+) strand; PAM type: NRG; PAM sequence: TGG
gttctctcagtttaagaagg

SEQ ID NO: 10343 - DNA, 20 bp, Artificial Sequence
  Description of Artificial Sequence: Synthetic oligonucleotide
  Target: ANGPTL4; (+) strand; PAM type: NRG; PAM sequence: GGG
ttctctcagtttaagaaggt

SEQ ID NO: 10344 - DNA, 20 bp, Artificial Sequence
  Description of Artificial Sequence: Synthetic oligonucleotide
  Target: ANGPTL4; (+) strand; PAM type: NRG; PAM sequence: GGG
tctctcagtttaagaaggtg

SEQ ID NO: 10345 - DNA, 20 bp, Artificial Sequence
  Description of Artificial Sequence: Synthetic oligonucleotide
  Target: ANGPTL4; (+) strand; PAM type: NRG; PAM sequence: AAG
ctcagtttaagaaggtgggg

SEQ ID NO: 10346 - DNA, 20 bp, Artificial Sequence
  Description of Artificial Sequence: Synthetic oligonucleotide
  Target: ANGPTL4; (+) strand; PAM type: NRG; PAM sequence: GAG
cagtttaagaaggtggggaa

SEQ ID NO: 10347 - DNA, 20 bp, Artificial Sequence
  Description of Artificial Sequence: Synthetic oligonucleotide
  Target: ANGPTL4; (+) strand; PAM type: NRG; PAM sequence: AGG
agtttaagaaggtggggaag

SEQ ID NO: 10348 - DNA, 20 bp, Artificial Sequence
  Description of Artificial Sequence: Synthetic oligonucleotide
  Target: ANGPTL4; (+) strand; PAM type: NRG; PAM sequence: GAG
tttaagaaggtggggaagag

SEQ ID NO: 10349 - DNA, 20 bp, Artificial Sequence
  Description of Artificial Sequence: Synthetic oligonucleotide
  Target: ANGPTL4; (+) strand; PAM type: NRG; PAM sequence: AGG
ttaagaaggtggggaagagg

SEQ ID NO: 10350 - DNA, 20 bp, Artificial Sequence
  Description of Artificial Sequence: Synthetic oligonucleotide
  Target: ANGPTL4; (+) strand; PAM type: NRG; PAM sequence: GAG
aagaaggtggggaagaggag

SEQ ID NO: 10351 - DNA, 20 bp, Artificial Sequence
  Description of Artificial Sequence: Synthetic oligonucleotide
  Target: ANGPTL4; (+) strand; PAM type: NRG; PAM sequence: TGG
aagaggaggagcttgcattc

SEQ ID NO: 10352 - DNA, 20 bp, Artificial Sequence
  Description of Artificial Sequence: Synthetic oligonucleotide
  Target: ANGPTL4; (+) strand; PAM type: NRG; PAM sequence: GGG
agaggaggagcttgcattct

SEQ ID NO: 10353 - DNA, 20 bp, Artificial Sequence
  Description of Artificial Sequence: Synthetic oligonucleotide
  Target: ANGPTL4; (+) strand; PAM type: NRG; PAM sequence: TAG
gaggagcttgcattctggga

SEQ ID NO: 10354 - DNA, 20 bp, Artificial Sequence
  Description of Artificial Sequence: Synthetic oligonucleotide
  Target: ANGPTL4; (+) strand; PAM type: NRG; PAM sequence: TGG
gcttgcattctgggatagcc

SEQ ID NO: 10355 - DNA, 20 bp, Artificial Sequence
  Description of Artificial Sequence: Synthetic oligonucleotide
  Target: ANGPTL4; (+) strand; PAM type: NRG; PAM sequence: GGG
cttgcattctgggatagcct

SEQ ID NO: 10356 - DNA, 20 bp, Artificial Sequence
  Description of Artificial Sequence: Synthetic oligonucleotide
  Target: ANGPTL4; (+) strand; PAM type: NRG; PAM sequence: TAG
cattctgggatagcctggga

SEQ ID NO: 10357 - DNA, 20 bp, Artificial Sequence
  Description of Artificial Sequence: Synthetic oligonucleotide
  Target: ANGPTL4; (+) strand; PAM type: NRG; PAM sequence: CAG
gggatagctgtgtccctact

SEQ ID NO: 10358 - DNA, 20 bp, Artificial Sequence
  Description of Artificial Sequence: Synthetic oligonucleotide
  Target: ANGPTL4; (+) strand; PAM type: NRG; PAM sequence: GAG
gatagctgtgtccctactca

SEQ ID NO: 10359 - DNA, 20 bp, Artificial Sequence
  Description of Artificial Sequence: Synthetic oligonucleotide
  Target: ANGPTL4; (+) strand; PAM type: NRG; PAM sequence: GAG
tagctgtgtccctactcaga

SEQ ID NO: 10360 - DNA, 20 bp, Artificial Sequence
  Description of Artificial Sequence: Synthetic oligonucleotide
  Target: ANGPTL4; (+) strand; PAM type: NRG; PAM sequence: GAG
gctgtgtccctactcagaga

SEQ ID NO: 10361 - DNA, 20 bp, Artificial Sequence
  Description of Artificial Sequence: Synthetic oligonucleotide
  Target: ANGPTL4; (+) strand; PAM type: NRG; PAM sequence: AGG
ctgtgtccctactcagagag

SEQ ID NO: 10362 - DNA, 20 bp, Artificial Sequence
  Description of Artificial Sequence: Synthetic oligonucleotide
  Target: ANGPTL4; (+) strand; PAM type: NRG; PAM sequence: TGG
gtccctactcagagagaggc

SEQ ID NO: 10363 - DNA, 20 bp, Artificial Sequence
  Description of Artificial Sequence: Synthetic oligonucleotide
  Target: ANGPTL4; (+) strand; PAM type: NRG; PAM sequence: GGG
tccctactcagagagaggct

SEQ ID NO: 10364 - DNA, 20 bp, Artificial Sequence
  Description of Artificial Sequence: Synthetic oligonucleotide
  Target: ANGPTL4; (+) strand; PAM type: NRG; PAM sequence: GGG
ccctactcagagagaggctg

SEQ ID NO: 10365 - DNA, 20 bp, Artificial Sequence
  Description of Artificial Sequence: Synthetic oligonucleotide
  Target: ANGPTL4; (+) strand; PAM type: NRG; PAM sequence: GGG
cctactcagagagaggctgg

SEQ ID NO: 10366 - DNA, 20 bp, Artificial Sequence
  Description of Artificial Sequence: Synthetic oligonucleotide
  Target: ANGPTL4; (+) strand; PAM type: NRG; PAM sequence: TGG
tcagagagaggctgggggct

SEQ ID NO: 10367 - DNA, 20 bp, Artificial Sequence
  Description of Artificial Sequence: Synthetic oligonucleotide
  Target: ANGPTL4; (+) strand; PAM type: NRG; PAM sequence: GGG
cagagagaggctgggggctt

SEQ ID NO: 10368 - DNA, 20 bp, Artificial Sequence
  Description of Artificial Sequence: Synthetic oligonucleotide
  Target: ANGPTL4; (+) strand; PAM type: NRG; PAM sequence: GGG
agagagaggctgggggcttg

SEQ ID NO: 10369 - DNA, 20 bp, Artificial Sequence
  Description of Artificial Sequence: Synthetic oligonucleotide
  Target: ANGPTL4; (+) strand; PAM type: NRG; PAM sequence: GGG
gagagaggctgggggcttgg

SEQ ID NO: 10370 - DNA, 20 bp, Artificial Sequence
  Description of Artificial Sequence: Synthetic oligonucleotide
  Target: ANGPTL4; (+) strand; PAM type: NRG; PAM sequence: TGG
agaggctgggggcttggggg

SEQ ID NO: 10371 - DNA, 20 bp, Artificial Sequence
  Description of Artificial Sequence: Synthetic oligonucleotide
  Target: ANGPTL4; (+) strand; PAM type: NRG; PAM sequence: CAG
gctgggggcttgggggtgga

SEQ ID NO: 10372 - DNA, 20 bp, Artificial Sequence
  Description of Artificial Sequence: Synthetic oligonucleotide
  Target: ANGPTL4; (+) strand; PAM type: NRG; PAM sequence: AGG
ctgggggcttgggggtggac

SEQ ID NO: 10373 - DNA, 20 bp, Artificial Sequence
  Description of Artificial Sequence: Synthetic oligonucleotide
  Target: ANGPTL4; (+) strand; PAM type: NRG; PAM sequence: CAG
gggcttgggggtggacaggc

SEQ ID NO: 10374 - DNA, 20 bp, Artificial Sequence
  Description of Artificial Sequence: Synthetic oligonucleotide
  Target: ANGPTL4; (+) strand; PAM type: NRG; PAM sequence: CGG
ttgggggtggacaggccaga

SEQ ID NO: 10375 - DNA, 20 bp, Artificial Sequence
  Description of Artificial Sequence: Synthetic oligonucleotide
  Target: ANGPTL4; (+) strand; PAM type: NRG; PAM sequence: TGG
catctgaacctactcctcac

SEQ ID NO: 10376 - DNA, 20 bp, Artificial Sequence
  Description of Artificial Sequence: Synthetic oligonucleotide
  Target: ANGPTL4; (+) strand; PAM type: NRG; PAM sequence: GGG
atctgaacctactcctcact

SEQ ID NO: 10377 - DNA, 20 bp, Artificial Sequence
  Description of Artificial Sequence: Synthetic oligonucleotide
  Target: ANGPTL4; (+) strand; PAM type: NRG; PAM sequence: GGG
tctgaacctactcctcactg

SEQ ID NO: 10378 - DNA, 20 bp, Artificial Sequence
  Description of Artificial Sequence: Synthetic oligonucleotide
  Target: ANGPTL4; (+) strand; PAM type: NRG; PAM sequence: TGG
cctttcctgtccactgctgc

SEQ ID NO: 10379 - DNA, 20 bp, Artificial Sequence
  Description of Artificial Sequence: Synthetic oligonucleotide
  Target: ANGPTL4; (+) strand; PAM type: NRG; PAM sequence: GGG
ctttcctgtccactgctgct

SEQ ID NO: 10380 - DNA, 20 bp, Artificial Sequence
  Description of Artificial Sequence: Synthetic oligonucleotide
  Target: ANGPTL4; (+) strand; PAM type: NRG; PAM sequence: GAG
ttcctgtccactgctgctgg

SEQ ID NO: 10381 - DNA, 20 bp, Artificial Sequence
  Description of Artificial Sequence: Synthetic oligonucleotide
  Target: ANGPTL4; (+) strand; PAM type: NRG; PAM sequence: AGG
tcctgtccactgctgctggg

SEQ ID NO: 10382 - DNA, 20 bp, Artificial Sequence
  Description of Artificial Sequence: Synthetic oligonucleotide
  Target: ANGPTL4; (+) strand; PAM type: NRG; PAM sequence: GGG
cctgtccactgctgctggga

SEQ ID NO: 10383 - DNA, 20 bp, Artificial Sequence
  Description of Artificial Sequence: Synthetic oligonucleotide
  Target: ANGPTL4; (+) strand; PAM type: NRG; PAM sequence: TGG
ctgggagggatttgctgtcc

SEQ ID NO: 10384 - DNA, 20 bp, Artificial Sequence
  Description of Artificial Sequence: Synthetic oligonucleotide
  Target: ANGPTL4; (+) strand; PAM type: NRG; PAM sequence: TGG
ggatttgctgtcctggcatc

SEQ ID NO: 10385 - DNA, 20 bp, Artificial Sequence
  Description of Artificial Sequence: Synthetic oligonucleotide
  Target: ANGPTL4; (+) strand; PAM type: NRG; PAM sequence: CAG
tgctgtcctggcatctggcc

SEQ ID NO: 10386 - DNA, 20 bp, Artificial Sequence
  Description of Artificial Sequence: Synthetic oligonucleotide
  Target: ANGPTL4; (+) strand; PAM type: NRG; PAM sequence: CGG
ctggcatctggcccagctga

SEQ ID NO: 10387 - DNA, 20 bp, Artificial Sequence
  Description of Artificial Sequence: Synthetic oligonucleotide
  Target: ANGPTL4; (+) strand; PAM type: NRG; PAM sequence: GGG
tggcatctggcccagctgac

SEQ ID NO: 10388 - DNA, 20 bp, Artificial Sequence
  Description of Artificial Sequence: Synthetic oligonucleotide
  Target: ANGPTL4; (+) strand; PAM type: NRG; PAM sequence: GGG
ggcatctggcccagctgacg

SEQ ID NO: 10389 - DNA, 20 bp, Artificial Sequence
  Description of Artificial Sequence: Synthetic oligonucleotide
  Target: ANGPTL4; (+) strand; PAM type: NRG; PAM sequence: AAG
ctggcccagctgacggggcc

SEQ ID NO: 10390 - DNA, 20 bp, Artificial Sequence
  Description of Artificial Sequence: Synthetic oligonucleotide
  Target: ANGPTL4; (+) strand; PAM type: NRG; PAM sequence: GAG
gctgacggggccaagtgtat

SEQ ID NO: 10391 - DNA, 20 bp, Artificial Sequence
  Description of Artificial Sequence: Synthetic oligonucleotide
  Target: ANGPTL4; (+) strand; PAM type: NRG; PAM sequence: TGG
gacggggccaagtgtatgag

SEQ ID NO: 10392 - DNA, 20 bp, Artificial Sequence
  Description of Artificial Sequence: Synthetic oligonucleotide
  Target: ANGPTL4; (+) strand; PAM type: NRG; PAM sequence: CAG
ggggccaagtgtatgagtgg

SEQ ID NO: 10393 - DNA, 20 bp, Artificial Sequence
  Description of Artificial Sequence: Synthetic oligonucleotide
  Target: ANGPTL4; (+) strand; PAM type: NRG; PAM sequence: CAG
atgagtggcagcctgcacgt

SEQ ID NO: 10394 - DNA, 20 bp, Artificial Sequence
  Description of Artificial Sequence: Synthetic oligonucleotide
  Target: ANGPTL4; (+) strand; PAM type: NRG; PAM sequence: TGG
gcagcctgcacgtcagccct

SEQ ID NO: 10395 - DNA, 20 bp, Artificial Sequence
  Description of Artificial Sequence: Synthetic oligonucleotide
  Target: ANGPTL4; (+) strand; PAM type: NRG; PAM sequence: GGG
cagcctgcacgtcagccctt

SEQ ID NO: 10396 - DNA, 20 bp, Artificial Sequence
  Description of Artificial Sequence: Synthetic oligonucleotide
  Target: ANGPTL4; (+) strand; PAM type: NRG; PAM sequence: CAG
cacgtcagcccttgggtgtg

SEQ ID NO: 10397 - DNA, 20 bp, Artificial Sequence
  Description of Artificial Sequence: Synthetic oligonucleotide
  Target: ANGPTL4; (+) strand; PAM type: NRG; PAM sequence: CAG
agcccttgggtgtgcagttt

SEQ ID NO: 10398 - DNA, 20 bp, Artificial Sequence
  Description of Artificial Sequence: Synthetic oligonucleotide
  Target: ANGPTL4; (+) strand; PAM type: NRG; PAM sequence: CAG
gggtgtgcagtttcagattc

SEQ ID NO: 10399 - DNA, 20 bp, Artificial Sequence
  Description of Artificial Sequence: Synthetic oligonucleotide
  Target: ANGPTL4; (+) strand; PAM type: NRG; PAM sequence: GAG
gtgtgcagtttcagattcca

SEQ ID NO: 10400 - DNA, 20 bp, Artificial Sequence
  Description of Artificial Sequence: Synthetic oligonucleotide
  Target: ANGPTL4; (+) strand; PAM type: NRG; PAM sequence: GAG
agtttcagattccagagaat

SEQ ID NO: 10401 - DNA, 20 bp, Artificial Sequence
  Description of Artificial Sequence: Synthetic oligonucleotide
  Target: ANGPTL4; (+) strand; PAM type: NRG; PAM sequence: TGG
tcagattccagagaatgagc

SEQ ID NO: 10402 - DNA, 20 bp, Artificial Sequence
  Description of Artificial Sequence: Synthetic oligonucleotide
  Target: ANGPTL4; (+) strand; PAM type: NRG; PAM sequence: TGG
ttccagagaatgagctggct

SEQ ID NO: 10403 - DNA, 20 bp, Artificial Sequence
  Description of Artificial Sequence: Synthetic oligonucleotide
  Target: ANGPTL4; (+) strand; PAM type: NRG; PAM sequence: GAG
ccagagaatgagctggcttg

SEQ ID NO: 10404 - DNA, 20 bp, Artificial Sequence
  Description of Artificial Sequence: Synthetic oligonucleotide
  Target: ANGPTL4; (+) strand; PAM type: NRG; PAM sequence: GAG
agctggcttggagccctgct

SEQ ID NO: 10405 - DNA, 20 bp, Artificial Sequence
  Description of Artificial Sequence: Synthetic oligonucleotide
  Target: ANGPTL4; (+) strand; PAM type: NRG; PAM sequence: CAG
gtcaatgcccttctccttgc

SEQ ID NO: 10406 - DNA, 20 bp, Artificial Sequence
  Description of Artificial Sequence: Synthetic oligonucleotide
  Target: ANGPTL4; (+) strand; PAM type: NRG; PAM sequence: GAG
cttctccttgccagtgctct

SEQ ID NO: 10407 - DNA, 20 bp, Artificial Sequence
  Description of Artificial Sequence: Synthetic oligonucleotide
  Target: ANGPTL4; (+) strand; PAM type: NRG; PAM sequence: GAG
gctctgagccaacctgcccc

SEQ ID NO: 10408 - DNA, 20 bp, Artificial Sequence
  Description of Artificial Sequence: Synthetic oligonucleotide
  Target: ANGPTL4; (+) strand; PAM type: NRG; PAM sequence: TGG
aacctgccccgagttcttcc

SEQ ID NO: 10409 - DNA, 20 bp, Artificial Sequence
  Description of Artificial Sequence: Synthetic oligonucleotide
  Target: ANGPTL4; (+) strand; PAM type: NRG; PAM sequence: CAG
ctgccccgagttcttcctgg

SEQ ID NO: 10410 - DNA, 20 bp, Artificial Sequence
  Description of Artificial Sequence: Synthetic oligonucleotide
  Target: ANGPTL4; (+) strand; PAM type: NRG; PAM sequence: AGG
tgccccgagttcttcctggc

SEQ ID NO: 10411 - DNA, 20 bp, Artificial Sequence
  Description of Artificial Sequence: Synthetic oligonucleotide
  Target: ANGPTL4; (+) strand; PAM type: NRG; PAM sequence: TGG
ccgagttcttcctggcaggc

SEQ ID NO: 10412 - DNA, 20 bp, Artificial Sequence
  Description of Artificial Sequence: Synthetic oligonucleotide
  Target: ANGPTL4; (+) strand; PAM type: NRG; PAM sequence: CAG
ggcaggctggttttctgtgc

SEQ ID NO: 10413 - DNA, 20 bp, Artificial Sequence
  Description of Artificial Sequence: Synthetic oligonucleotide
  Target: ANGPTL4; (+) strand; PAM type: NRG; PAM sequence: CAG
tgccagcctccccttcctga

SEQ ID NO: 10414 - DNA, 20 bp, Artificial Sequence
  Description of Artificial Sequence: Synthetic oligonucleotide
  Target: ANGPTL4; (+) strand; PAM type: NRG; PAM sequence: AGG
gccagcctccccttcctgac

SEQ ID NO: 10415 - DNA, 20 bp, Artificial Sequence
  Description of Artificial Sequence: Synthetic oligonucleotide
  Target: ANGPTL4; (+) strand; PAM type: NRG; PAM sequence: GGG
ccagcctccccttcctgaca

SEQ ID NO: 10416 - DNA, 20 bp, Artificial Sequence
  Description of Artificial Sequence: Synthetic oligonucleotide
  Target: ANGPTL4; (+) strand; PAM type: NRG; PAM sequence: TAG
ctccccttcctgacagggta

SEQ ID NO: 10417 - DNA, 20 bp, Artificial Sequence
  Description of Artificial Sequence: Synthetic oligonucleotide
  Target: ANGPTL4; (+) strand; PAM type: NRG; PAM sequence: AGG
tccccttcctgacagggtat

SEQ ID NO: 10418 - DNA, 20 bp, Artificial Sequence
  Description of Artificial Sequence: Synthetic oligonucleotide
  Target: ANGPTL4; (+) strand; PAM type: NRG; PAM sequence: GGG
ccccttcctgacagggtata

SEQ ID NO: 10419 - DNA, 20 bp, Artificial Sequence
  Description of Artificial Sequence: Synthetic oligonucleotide
  Target: ANGPTL4; (+) strand; PAM type: NRG; PAM sequence: GGG
cccttcctgacagggtatag

SEQ ID NO: 10420 - DNA, 20 bp, Artificial Sequence
  Description of Artificial Sequence: Synthetic oligonucleotide
  Target: ANGPTL4; (+) strand; PAM type: NRG; PAM sequence: TGG
cctgacagggtataggggaa

SEQ ID NO: 10421 - DNA, 20 bp, Artificial Sequence
  Description of Artificial Sequence: Synthetic oligonucleotide
  Target: ANGPTL4; (+) strand; PAM type: NRG; PAM sequence: GGG
ctgacagggtataggggaat

SEQ ID NO: 10422 - DNA, 20 bp, Artificial Sequence
  Description of Artificial Sequence: Synthetic oligonucleotide
  Target: ANGPTL4; (+) strand; PAM type: NRG; PAM sequence: TAG
acagggtataggggaatggg

SEQ ID NO: 10423 - DNA, 20 bp, Artificial Sequence
  Description of Artificial Sequence: Synthetic oligonucleotide
  Target: ANGPTL4; (+) strand; PAM type: NRG; PAM sequence: AGG
cagggtataggggaatgggt

SEQ ID NO: 10424 - DNA, 20 bp, Artificial Sequence
  Description of Artificial Sequence: Synthetic oligonucleotide
  Target: ANGPTL4; (+) strand; PAM type: NRG; PAM sequence: GGG
agggtataggggaatgggta

SEQ ID NO: 10425 - DNA, 20 bp, Artificial Sequence
  Description of Artificial Sequence: Synthetic oligonucleotide
  Target: ANGPTL4; (+) strand; PAM type: NRG; PAM sequence: AAG
gtataggggaatgggtaggg

SEQ ID NO: 10426 - DNA, 20 bp, Artificial Sequence
  Description of Artificial Sequence: Synthetic oligonucleotide
  Target: ANGPTL4; (+) strand; PAM type: NRG; PAM sequence: GAG
ataggggaatgggtagggaa

SEQ ID NO: 10427 - DNA, 20 bp, Artificial Sequence
  Description of Artificial Sequence: Synthetic oligonucleotide
  Target: ANGPTL4; (+) strand; PAM type: NRG; PAM sequence: AGG
taggggaatgggtagggaag

SEQ ID NO: 10428 - DNA, 20 bp, Artificial Sequence
  Description of Artificial Sequence: Synthetic oligonucleotide
  Target: ANGPTL4; (+) strand; PAM type: NRG; PAM sequence: CAG
gggaatgggtagggaagagg

SEQ ID NO: 10429 - DNA, 20 bp, Artificial Sequence
  Description of Artificial Sequence: Synthetic oligonucleotide
  Target: ANGPTL4; (+) strand; PAM type: NRG; PAM sequence: GAG
gaatgggtagggaagaggca

SEQ ID NO: 10430 - DNA, 20 bp, Artificial Sequence
  Description of Artificial Sequence: Synthetic oligonucleotide
  Target: ANGPTL4; (+) strand; PAM type: NRG; PAM sequence: AGG
aatgggtagggaagaggcag

SEQ ID NO: 10431 - DNA, 20 bp, Artificial Sequence
  Description of Artificial Sequence: Synthetic oligonucleotide
  Target: ANGPTL4; (+) strand; PAM type: NRG; PAM sequence: GAG
tgggtagggaagaggcagag

SEQ ID NO: 10432 - DNA, 20 bp, Artificial Sequence
  Description of Artificial Sequence: Synthetic oligonucleotide
  Target: ANGPTL4; (+) strand; PAM type: NRG; PAM sequence: CGG
agggaagaggcagaggagat

SEQ ID NO: 10433 - DNA, 20 bp, Artificial Sequence
  Description of Artificial Sequence: Synthetic oligonucleotide
  Target: ANGPTL4; (+) strand; PAM type: NRG; PAM sequence: AAG
gaggcagaggagatcggtgc

SEQ ID NO: 10434 - DNA, 20 bp, Artificial Sequence
  Description of Artificial Sequence: Synthetic oligonucleotide
  Target: ANGPTL4; (+) strand; PAM type: NRG; PAM sequence: TAG
tgcaagtttgaatgaacact

SEQ ID NO: 10435 - DNA, 20 bp, Artificial Sequence
  Description of Artificial Sequence: Synthetic oligonucleotide
  Target: ANGPTL4; (+) strand; PAM type: NRG; PAM sequence: TGG
tgaatgaacacttagccctg

SEQ ID NO: 10436 - DNA, 20 bp, Artificial Sequence
  Description of Artificial Sequence: Synthetic oligonucleotide
  Target: ANGPTL4; (+) strand; PAM type: NRG; PAM sequence: TGG
ttagccctgtggaatgaatg

SEQ ID NO: 10437 - DNA, 20 bp, Artificial Sequence
  Description of Artificial Sequence: Synthetic oligonucleotide
  Target: ANGPTL4; (+) strand; PAM type: NRG; PAM sequence: CAG
cctgtggaatgaatgtggtc

SEQ ID NO: 10438 - DNA, 20 bp, Artificial Sequence
  Description of Artificial Sequence: Synthetic oligonucleotide
  Target: ANGPTL4; (+) strand; PAM type: NRG; PAM sequence: TAG
atgaatgtggtccagccctt

SEQ ID NO: 10439 - DNA, 20 bp, Artificial Sequence
  Description of Artificial Sequence: Synthetic oligonucleotide
  Target: ANGPTL4; (+) strand; PAM type: NRG; PAM sequence: CAG
tccagccctttagcctcact

SEQ ID NO: 10440 - DNA, 20 bp, Artificial Sequence
  Description of Artificial Sequence: Synthetic oligonucleotide
  Target: ANGPTL4; (+) strand; PAM type: NRG; PAM sequence: CAG
tcccaactctatccctaccc

SEQ ID NO: 10441 - DNA, 20 bp, Artificial Sequence
  Description of Artificial Sequence: Synthetic oligonucleotide
  Target: ANGPTL4; (+) strand; PAM type: NRG; PAM sequence: AGG
cccaactctatccctacccc

SEQ ID NO: 10442 - DNA, 20 bp, Artificial Sequence
  Description of Artificial Sequence: Synthetic oligonucleotide
  Target: ANGPTL4; (+) strand; PAM type: NRG; PAM sequence: CAG
ctctatccctaccccaggct

SEQ ID NO: 10443 - DNA, 20 bp, Artificial Sequence
  Description of Artificial Sequence: Synthetic oligonucleotide
  Target: ANGPTL4; (+) strand; PAM type: NRG; PAM sequence: TGG
ctaccccaggctcagaatgt

SEQ ID NO: 10444 - DNA, 20 bp, Artificial Sequence
  Description of Artificial Sequence: Synthetic oligonucleotide
  Target: ANGPTL4; (+) strand; PAM type: NRG; PAM sequence: GGG
taccccaggctcagaatgtt

SEQ ID NO: 10445 - DNA, 20 bp, Artificial Sequence
  Description of Artificial Sequence: Synthetic oligonucleotide
  Target: ANGPTL4; (+) strand; PAM type: NRG; PAM sequence: GGG
accccaggctcagaatgttg

SEQ ID NO: 10446 - DNA, 20 bp, Artificial Sequence
  Description of Artificial Sequence: Synthetic oligonucleotide
  Target: ANGPTL4; (+) strand; PAM type: NRG; PAM sequence: GAG
tggggtatctccacctgcct

SEQ ID NO: 10447 - DNA, 20 bp, Artificial Sequence
  Description of Artificial Sequence: Synthetic oligonucleotide
  Target: ANGPTL4; (+) strand; PAM type: NRG; PAM sequence: CAG
gcctgagaacttcaaacata

SEQ ID NO: 10448 - DNA, 20 bp, Artificial Sequence
  Description of Artificial Sequence: Synthetic oligonucleotide
  Target: ANGPTL4; (+) strand; PAM type: NRG; PAM sequence: AGG
cctgagaacttcaaacatac

SEQ ID NO: 10449 - DNA, 20 bp, Artificial Sequence
  Description of Artificial Sequence: Synthetic oligonucleotide
  Target: ANGPTL4; (+) strand; PAM type: NRG; PAM sequence: GGG
ctgagaacttcaaacataca

SEQ ID NO: 10450 - DNA, 20 bp, Artificial Sequence
  Description of Artificial Sequence: Synthetic oligonucleotide
  Target: ANGPTL4; (+) strand; PAM type: NRG; PAM sequence: GGG
tgagaacttcaaacatacag

SEQ ID NO: 10451 - DNA, 20 bp, Artificial Sequence
  Description of Artificial Sequence: Synthetic oligonucleotide
  Target: ANGPTL4; (+) strand; PAM type: NRG; PAM sequence: TGG
aacttcaaacatacaggggc

SEQ ID NO: 10452 - DNA, 20 bp, Artificial Sequence
  Description of Artificial Sequence: Synthetic oligonucleotide
  Target: ANGPTL4; (+) strand; PAM type: NRG; PAM sequence: GGG
acttcaaacatacaggggct

SEQ ID NO: 10453 - DNA, 20 bp, Artificial Sequence
  Description of Artificial Sequence: Synthetic oligonucleotide
  Target: ANGPTL4; (+) strand; PAM type: NRG; PAM sequence: TAG
aaacatacaggggctgggct

SEQ ID NO: 10454 - DNA, 20 bp, Artificial Sequence
  Description of Artificial Sequence: Synthetic oligonucleotide
  Target: ANGPTL4; (+) strand; PAM type: NRG; PAM sequence: GAG
acatacaggggctgggctta

SEQ ID NO: 10455 - DNA, 20 bp, Artificial Sequence
  Description of Artificial Sequence: Synthetic oligonucleotide
  Target: ANGPTL4; (+) strand; PAM type: NRG; PAM sequence: AGG
catacaggggctgggcttag

SEQ ID NO: 10456 - DNA, 20 bp, Artificial Sequence
  Description of Artificial Sequence: Synthetic oligonucleotide
  Target: ANGPTL4; (+) strand; PAM type: NRG; PAM sequence: GGG
atacaggggctgggcttaga

SEQ ID NO: 10457 - DNA, 20 bp, Artificial Sequence
  Description of Artificial Sequence: Synthetic oligonucleotide
  Target: ANGPTL4; (+) strand; PAM type: NRG; PAM sequence: CAG
caggggctgggcttagaggg

SEQ ID NO: 10458 - DNA, 20 bp, Artificial Sequence
  Description of Artificial Sequence: Synthetic oligonucleotide
  Target: ANGPTL4; (+) strand; PAM type: NRG; PAM sequence: CAG
gggctgggcttagagggcag

SEQ ID NO: 10459 - DNA, 20 bp, Artificial Sequence
  Description of Artificial Sequence: Synthetic oligonucleotide
  Target: ANGPTL4; (+) strand; PAM type: NRG; PAM sequence: CAG
agggcagcagcaccttcgtt

SEQ ID NO: 10460 - DNA, 20 bp, Artificial Sequence
  Description of Artificial Sequence: Synthetic oligonucleotide
  Target: ANGPTL4; (+) strand; PAM type: NRG; PAM sequence: GAG
agcaccttcgttcagtgcat

SEQ ID NO: 10461 - DNA, 20 bp, Artificial Sequence
  Description of Artificial Sequence: Synthetic oligonucleotide
  Target: ANGPTL4; (+) strand; PAM type: NRG; PAM sequence: GAG
gcatgagtgaatgaatgaat

SEQ ID NO: 10462 - DNA, 20 bp, Artificial Sequence
  Description of Artificial Sequence: Synthetic oligonucleotide
  Target: ANGPTL4; (+) strand; PAM type: NRG; PAM sequence: AGG
catgagtgaatgaatgaatg

SEQ ID NO: 10463 - DNA, 20 bp, Artificial Sequence
  Description of Artificial Sequence: Synthetic oligonucleotide
  Target: ANGPTL4; (+) strand; PAM type: NRG; PAM sequence: GGG
atgagtgaatgaatgaatga

SEQ ID NO: 10464 - DNA, 20 bp, Artificial Sequence
  Description of Artificial Sequence: Synthetic oligonucleotide
  Target: ANGPTL4; (+) strand; PAM type: NRG; PAM sequence: GAG
gagtgaatgaatgaatgagg

SEQ ID NO: 10465 - DNA, 20 bp, Artificial Sequence
  Description of Artificial Sequence: Synthetic oligonucleotide
  Target: ANGPTL4; (+) strand; PAM type: NRG; PAM sequence: GAG
gtgaatgaatgaatgaggga

SEQ ID NO: 10466 - DNA, 20 bp, Artificial Sequence
  Description of Artificial Sequence: Synthetic oligonucleotide
  Target: ANGPTL4; (+) strand; PAM type: NRG; PAM sequence: AAG
atgaatgaatgagggagaga

SEQ ID NO: 10467 - DNA, 20 bp, Artificial Sequence
  Description of Artificial Sequence: Synthetic oligonucleotide
  Target: ANGPTL4; (+) strand; PAM type: NRG; PAM sequence: GAG
gaatgaatgagggagagaaa

SEQ ID NO: 10468 - DNA, 20 bp, Artificial Sequence
  Description of Artificial Sequence: Synthetic oligonucleotide
  Target: ANGPTL4; (+) strand; PAM type: NRG; PAM sequence: AGG
aatgaatgagggagagaaag

SEQ ID NO: 10469 - DNA, 20 bp, Artificial Sequence
  Description of Artificial Sequence: Synthetic oligonucleotide
  Target: ANGPTL4; (+) strand; PAM type: NRG; PAM sequence: AAG
gaatgagggagagaaagagg

SEQ ID NO: 10470 - DNA, 20 bp, Artificial Sequence
  Description of Artificial Sequence: Synthetic oligonucleotide
  Target: ANGPTL4; (+) strand; PAM type: NRG; PAM sequence: AGG
aatgagggagagaaagagga

SEQ ID NO: 10471 - DNA, 20 bp, Artificial Sequence
  Description of Artificial Sequence: Synthetic oligonucleotide
  Target: ANGPTL4; (+) strand; PAM type: NRG; PAM sequence: CAG
ttttttttttttttgacaca

SEQ ID NO: 10472 - DNA, 20 bp, Artificial Sequence
  Description of Artificial Sequence: Synthetic oligonucleotide
  Target: ANGPTL4; (+) strand; PAM type: NRG; PAM sequence: CAG
cacagtctcactctgtcacc

SEQ ID NO: 10473 - DNA, 20 bp, Artificial Sequence
  Description of Artificial Sequence: Synthetic oligonucleotide
  Target: ANGPTL4; (+) strand; PAM type: NRG; PAM sequence: AGG
acagtctcactctgtcaccc

SEQ ID NO: 10474 - DNA, 20 bp, Artificial Sequence
  Description of Artificial Sequence: Synthetic oligonucleotide
  Target: ANGPTL4; (+) strand; PAM type: NRG; PAM sequence: TGG
tctcactctgtcacccaggc

SEQ ID NO: 10475 - DNA, 20 bp, Artificial Sequence
  Description of Artificial Sequence: Synthetic oligonucleotide
  Target: ANGPTL4; (+) strand; PAM type: NRG; PAM sequence: GAG
tcactctgtcacccaggctg

SEQ ID NO: 10476 - DNA, 20 bp, Artificial Sequence
  Description of Artificial Sequence: Synthetic oligonucleotide
  Target: ANGPTL4; (+) strand; PAM type: NRG; PAM sequence: TGG
tcacccaggctggagtgctg

SEQ ID NO: 10477 - DNA, 20 bp, Artificial Sequence
  Description of Artificial Sequence: Synthetic oligonucleotide
  Target: ANGPTL4; (+) strand; PAM type: NRG; PAM sequence: CAG
ggagtgctgtggtgcaatct

SEQ ID NO: 10478 - DNA, 20 bp, Artificial Sequence
  Description of Artificial Sequence: Synthetic oligonucleotide
  Target: ANGPTL4; (+) strand; PAM type: NRG; PAM sequence: GAG
cactgcaacctccgtctcct

SEQ ID NO: 10479 - DNA, 20 bp, Artificial Sequence
  Description of Artificial Sequence: Synthetic oligonucleotide
  Target: ANGPTL4; (+) strand; PAM type: NRG; PAM sequence: AAG
aacctccgtctcctgagttc

SEQ ID NO: 10480 - DNA, 20 bp, Artificial Sequence
  Description of Artificial Sequence: Synthetic oligonucleotide
  Target: ANGPTL4; (+) strand; PAM type: NRG; PAM sequence: CAG
ttcaagcgattctcctgaca

SEQ ID NO: 10481 - DNA, 20 bp, Artificial Sequence
  Description of Artificial Sequence: Synthetic oligonucleotide
  Target: ANGPTL4; (+) strand; PAM type: NRG; PAM sequence: GAG
ttctcctgacacagtctccc

SEQ ID NO: 10482 - DNA, 20 bp, Artificial Sequence
  Description of Artificial Sequence: Synthetic oligonucleotide
  Target: ANGPTL4; (+) strand; PAM type: NRG; PAM sequence: TAG
tcctgacacagtctcccgag

SEQ ID NO: 10483 - DNA, 20 bp, Artificial Sequence
  Description of Artificial Sequence: Synthetic oligonucleotide
  Target: ANGPTL4; (+) strand; PAM type: NRG; PAM sequence: AAG
acagtctcccgagtagctgt

SEQ ID NO: 10484 - DNA, 20 bp, Artificial Sequence
  Description of Artificial Sequence: Synthetic oligonucleotide
  Target: ANGPTL4; (+) strand; PAM type: NRG; PAM sequence: CGG
taagcacgtgccaccacacc

SEQ ID NO: 10485 - DNA, 20 bp, Artificial Sequence
  Description of Artificial Sequence: Synthetic oligonucleotide
  Target: ANGPTL4; (+) strand; PAM type: NRG; PAM sequence: TAG
cccggctaattttttatttt

SEQ ID NO: 10486 - DNA, 20 bp, Artificial Sequence
  Description of Artificial Sequence: Synthetic oligonucleotide
  Target: ANGPTL4; (+) strand; PAM type: NRG; PAM sequence: TAG
ggctaattttttatttttag

SEQ ID NO: 10487 - DNA, 20 bp, Artificial Sequence
  Description of Artificial Sequence: Synthetic oligonucleotide
  Target: ANGPTL4; (+) strand; PAM type: NRG; PAM sequence: GAG
ctaattttttatttttagta

SEQ ID NO: 10488 - DNA, 20 bp, Artificial Sequence
  Description of Artificial Sequence: Synthetic oligonucleotide
  Target: ANGPTL4; (+) strand; PAM type: NRG; PAM sequence: GAG
tttttatttttagtagagac

SEQ ID NO: 10489 - DNA, 20 bp, Artificial Sequence
  Description of Artificial Sequence: Synthetic oligonucleotide
  Target: ANGPTL4; (+) strand; PAM type: NRG; PAM sequence: AGG
ttttatttttagtagagacg

SEQ ID NO: 10490 - DNA, 20 bp, Artificial Sequence
  Description of Artificial Sequence: Synthetic oligonucleotide
  Target: ANGPTL4; (+) strand; PAM type: NRG; PAM sequence: TGG
gagacgaggtttcaccatgt

SEQ ID NO: 10491 - DNA, 20 bp, Artificial Sequence
  Description of Artificial Sequence: Synthetic oligonucleotide
  Target: ANGPTL4; (+) strand; PAM type: NRG; PAM sequence: CAG
cgaggtttcaccatgttggc

SEQ ID NO: 10492 - DNA, 20 bp, Artificial Sequence
  Description of Artificial Sequence: Synthetic oligonucleotide
  Target: ANGPTL4; (+) strand; PAM type: NRG; PAM sequence: AGG
gaggtttcaccatgttggcc

SEQ ID NO: 10493 - DNA, 20 bp, Artificial Sequence
  Description of Artificial Sequence: Synthetic oligonucleotide
  Target: ANGPTL4; (+) strand; PAM type: NRG; PAM sequence: CAG
tgatctcgaacccctgacct

SEQ ID NO: 10494 - DNA, 20 bp, Artificial Sequence
  Description of Artificial Sequence: Synthetic oligonucleotide
  Target: ANGPTL4; (+) strand; PAM type: NRG; PAM sequence: AGG
gatctcgaacccctgacctc

SEQ ID NO: 10495 - DNA, 20 bp, Artificial Sequence
  Description of Artificial Sequence: Synthetic oligonucleotide
  Target: ANGPTL4; (+) strand; PAM type: NRG; PAM sequence: CGG
cccccccccctcccaccacc

SEQ ID NO: 10496 - DNA, 20 bp, Artificial Sequence
  Description of Artificial Sequence: Synthetic oligonucleotide
  Target: ANGPTL4; (+) strand; PAM type: NRG; PAM sequence: AAG
tcccaccacccggcctccca

SEQ ID NO: 10497 - DNA, 20 bp, Artificial Sequence
  Description of Artificial Sequence: Synthetic oligonucleotide
  Target: ANGPTL4; (+) strand; PAM type: NRG; PAM sequence: TGG
cacccggcctcccaaagtgc

SEQ ID NO: 10498 - DNA, 20 bp, Artificial Sequence
  Description of Artificial Sequence: Synthetic oligonucleotide
  Target: ANGPTL4; (+) strand; PAM type: NRG; PAM sequence: GGG
acccggcctcccaaagtgct

SEQ ID NO: 10499 - DNA, 20 bp, Artificial Sequence
  Description of Artificial Sequence: Synthetic oligonucleotide
  Target: ANGPTL4; (+) strand; PAM type: NRG; PAM sequence: CAG
ctcccaaagtgctgggatta

SEQ ID NO: 10500 - DNA, 20 bp, Artificial Sequence
  Description of Artificial Sequence: Synthetic oligonucleotide
  Target: ANGPTL4; (+) strand; PAM type: NRG; PAM sequence: AGG
tcccaaagtgctgggattac

SEQ ID NO: 10501 - DNA, 20 bp, Artificial Sequence
  Description of Artificial Sequence: Synthetic oligonucleotide
  Target: ANGPTL4; (+) strand; PAM type: NRG; PAM sequence: GAG
agtgctgggattacaggcgt

SEQ ID NO: 10502 - DNA, 20 bp, Artificial Sequence
  Description of Artificial Sequence: Synthetic oligonucleotide
  Target: ANGPTL4; (+) strand; PAM type: NRG; PAM sequence: TGG
caggcgtgagccaccgcgcc

SEQ ID NO: 10503 - DNA, 20 bp, Artificial Sequence
  Description of Artificial Sequence: Synthetic oligonucleotide
  Target: ANGPTL4; (+) strand; PAM type: NRG; PAM sequence: CAG
tgagccaccgcgcctggcca

SEQ ID NO: 10504 - DNA, 20 bp, Artificial Sequence
  Description of Artificial Sequence: Synthetic oligonucleotide
  Target: ANGPTL4; (+) strand; PAM type: NRG; PAM sequence: TAG
cttttattttatttcttttt

SEQ ID NO: 10505 - DNA, 20 bp, Artificial Sequence
  Description of Artificial Sequence: Synthetic oligonucleotide
  Target: ANGPTL4; (+) strand; PAM type: NRG; PAM sequence: GAG
tttattttatttctttttta

SEQ ID NO: 10506 - DNA, 20 bp, Artificial Sequence
  Description of Artificial Sequence: Synthetic oligonucleotide
  Target: ANGPTL4; (+) strand; PAM type: NRG; PAM sequence: CAG
ttttatttcttttttagaga

SEQ ID NO: 10507 - DNA, 20 bp, Artificial Sequence
  Description of Artificial Sequence: Synthetic oligonucleotide
  Target: ANGPTL4; (+) strand; PAM type: NRG; PAM sequence: AGG
tttatttcttttttagagac

SEQ ID NO: 10508 - DNA, 20 bp, Artificial Sequence
  Description of Artificial Sequence: Synthetic oligonucleotide
  Target: ANGPTL4; (+) strand; PAM type: NRG; PAM sequence: CAG
caggatctcactctgttgcc

SEQ ID NO: 10509 - DNA, 20 bp, Artificial Sequence
  Description of Artificial Sequence: Synthetic oligonucleotide
  Target: ANGPTL4; (+) strand; PAM type: NRG; PAM sequence: AGG
aggatctcactctgttgccc

SEQ ID NO: 10510 - DNA, 20 bp, Artificial Sequence
  Description of Artificial Sequence: Synthetic oligonucleotide
  Target: ANGPTL4; (+) strand; PAM type: NRG; PAM sequence: TGG
tctcactctgttgcccaggc

SEQ ID NO: 10511 - DNA, 20 bp, Artificial Sequence
  Description of Artificial Sequence: Synthetic oligonucleotide
  Target: ANGPTL4; (+) strand; PAM type: NRG; PAM sequence: GAG
tcactctgttgcccaggctg

SEQ ID NO: 10512 - DNA, 20 bp, Artificial Sequence
  Description of Artificial Sequence: Synthetic oligonucleotide
  Target: ANGPTL4; (+) strand; PAM type: NRG; PAM sequence: CAG
ctgttgcccaggctggagtg

SEQ ID NO: 10513 - DNA, 20 bp, Artificial Sequence
  Description of Artificial Sequence: Synthetic oligonucleotide
  Target: ANGPTL4; (+) strand; PAM type: NRG; PAM sequence: TGG
ttgcccaggctggagtgcag

SEQ ID NO: 10514 - DNA, 20 bp, Artificial Sequence
  Description of Artificial Sequence: Synthetic oligonucleotide
  Target: ANGPTL4; (+) strand; PAM type: NRG; PAM sequence: TGG
ggagtgcagtggcaccattg

SEQ ID NO: 10515 - DNA, 20 bp, Artificial Sequence
  Description of Artificial Sequence: Synthetic oligonucleotide
  Target: ANGPTL4; (+) strand; PAM type: NRG; PAM sequence: CAG
ggcaccattgtggctcactg

SEQ ID NO: 10516 - DNA, 20 bp, Artificial Sequence
  Description of Artificial Sequence: Synthetic oligonucleotide
  Target: ANGPTL4; (+) strand; PAM type: NRG; PAM sequence: TGG
tcactgcagcctctacctcc

SEQ ID NO: 10517 - DNA, 20 bp, Artificial Sequence
  Description of Artificial Sequence: Synthetic oligonucleotide
  Target: ANGPTL4; (+) strand; PAM type: NRG; PAM sequence: GGG
cactgcagcctctacctcct

SEQ ID NO: 10518 - DNA, 20 bp, Artificial Sequence
  Description of Artificial Sequence: Synthetic oligonucleotide
  Target: ANGPTL4; (+) strand; PAM type: NRG; PAM sequence: AAG
agcctctacctcctgggctc

SEQ ID NO: 10519 - DNA, 20 bp, Artificial Sequence
  Description of Artificial Sequence: Synthetic oligonucleotide
  Target: ANGPTL4; (+) strand; PAM type: NRG; PAM sequence: GAG
tctacctcctgggctcaagt

SEQ ID NO: 10520 - DNA, 20 bp, Artificial Sequence
  Description of Artificial Sequence: Synthetic oligonucleotide
  Target: ANGPTL4; (+) strand; PAM type: NRG; PAM sequence: CAG
ctcaagtgagcctcccacct

SEQ ID NO: 10521 - DNA, 20 bp, Artificial Sequence
  Description of Artificial Sequence: Synthetic oligonucleotide
  Target: ANGPTL4; (+) strand; PAM type: NRG; PAM sequence: AGG
tcaagtgagcctcccacctc

SEQ ID NO: 10522 - DNA, 20 bp, Artificial Sequence
  Description of Artificial Sequence: Synthetic oligonucleotide
  Target: ANGPTL4; (+) strand; PAM type: NRG; PAM sequence: AAG
gcctcccacctcaggctccc

SEQ ID NO: 10523 - DNA, 20 bp, Artificial Sequence
  Description of Artificial Sequence: Synthetic oligonucleotide
  Target: ANGPTL4; (+) strand; PAM type: NRG; PAM sequence: TAG
tcccacctcaggctcccaag

SEQ ID NO: 10524 - DNA, 20 bp, Artificial Sequence
  Description of Artificial Sequence: Synthetic oligonucleotide
  Target: ANGPTL4; (+) strand; PAM type: NRG; PAM sequence: CAG
ctcccaagtagctgcgacca

SEQ ID NO: 10525 - DNA, 20 bp, Artificial Sequence
  Description of Artificial Sequence: Synthetic oligonucleotide
  Target: ANGPTL4; (+) strand; PAM type: NRG; PAM sequence: TGG
agtagctgcgaccacagtca

SEQ ID NO: 10526 - DNA, 20 bp, Artificial Sequence
  Description of Artificial Sequence: Synthetic oligonucleotide
  Target: ANGPTL4; (+) strand; PAM type: NRG; PAM sequence: GGG
gtagctgcgaccacagtcat

SEQ ID NO: 10527 - DNA, 20 bp, Artificial Sequence
  Description of Artificial Sequence: Synthetic oligonucleotide
  Target: ANGPTL4; (+) strand; PAM type: NRG; PAM sequence: TGG
acagtcatgggcgaccgccc

SEQ ID NO: 10528 - DNA, 20 bp, Artificial Sequence
  Description of Artificial Sequence: Synthetic oligonucleotide
  Target: ANGPTL4; (+) strand; PAM type: NRG; PAM sequence: AAG
gtctcctctttctgttctct

SEQ ID NO: 10529 - DNA, 20 bp, Artificial Sequence
  Description of Artificial Sequence: Synthetic oligonucleotide
  Target: ANGPTL4; (+) strand; PAM type: NRG; PAM sequence: TAG
tctaagttcctgctttatta

SEQ ID NO: 10530 - DNA, 20 bp, Artificial Sequence
  Description of Artificial Sequence: Synthetic oligonucleotide
  Target: ANGPTL4; (+) strand; PAM type: NRG; PAM sequence: AGG
ctaagttcctgctttattat

SEQ ID NO: 10531 - DNA, 20 bp, Artificial Sequence
  Description of Artificial Sequence: Synthetic oligonucleotide
  Target: ANGPTL4; (+) strand; PAM type: NRG; PAM sequence: AAG
ttcctgctttattataggca

SEQ ID NO: 10532 - DNA, 20 bp, Artificial Sequence
  Description of Artificial Sequence: Synthetic oligonucleotide
  Target: ANGPTL4; (+) strand; PAM type: NRG; PAM sequence: CAG
gctttattataggcaaagct

SEQ ID NO: 10533 - DNA, 20 bp, Artificial Sequence
  Description of Artificial Sequence: Synthetic oligonucleotide
  Target: ANGPTL4; (+) strand; PAM type: NRG; PAM sequence: AGG
ctttattataggcaaagctc

SEQ ID NO: 10534 - DNA, 20 bp, Artificial Sequence
  Description of Artificial Sequence: Synthetic oligonucleotide
  Target: ANGPTL4; (+) strand; PAM type: NRG; PAM sequence: AAG
aggcaaagctcaggacatta

SEQ ID NO: 10535 - DNA, 20 bp, Artificial Sequence
  Description of Artificial Sequence: Synthetic oligonucleotide
  Target: ANGPTL4; (+) strand; PAM type: NRG; PAM sequence: TGG
gctcaggacattaaagaccc

SEQ ID NO: 10536 - DNA, 20 bp, Artificial Sequence
  Description of Artificial Sequence: Synthetic oligonucleotide
  Target: ANGPTL4; (+) strand; PAM type: NRG; PAM sequence: CGG
caggacattaaagaccctgg

SEQ ID NO: 10537 - DNA, 20 bp, Artificial Sequence
  Description of Artificial Sequence: Synthetic oligonucleotide
  Target: ANGPTL4; (+) strand; PAM type: NRG; PAM sequence: TAG
gacattaaagaccctggcgg

SEQ ID NO: 10538 - DNA, 20 bp, Artificial Sequence
  Description of Artificial Sequence: Synthetic oligonucleotide
  Target: ANGPTL4; (+) strand; PAM type: NRG; PAM sequence: GAG
cattaaagaccctggcggta

SEQ ID NO: 10539 - DNA, 20 bp, Artificial Sequence
  Description of Artificial Sequence: Synthetic oligonucleotide
  Target: ANGPTL4; (+) strand; PAM type: NRG; PAM sequence: AGG
attaaagaccctggcggtag

SEQ ID NO: 10540 - DNA, 20 bp, Artificial Sequence
  Description of Artificial Sequence: Synthetic oligonucleotide
  Target: ANGPTL4; (+) strand; PAM type: NRG; PAM sequence: GGG
ttaaagaccctggcggtaga

SEQ ID NO: 10541 - DNA, 20 bp, Artificial Sequence
  Description of Artificial Sequence: Synthetic oligonucleotide
  Target: ANGPTL4; (+) strand; PAM type: NRG; PAM sequence: TAG
aagaccctggcggtagaggg

SEQ ID NO: 10542 - DNA, 20 bp, Artificial Sequence
  Description of Artificial Sequence: Synthetic oligonucleotide
  Target: ANGPTL4; (+) strand; PAM type: NRG; PAM sequence: AGG
agaccctggcggtagagggt

SEQ ID NO: 10543 - DNA, 20 bp, Artificial Sequence
  Description of Artificial Sequence: Synthetic oligonucleotide
  Target: ANGPTL4; (+) strand; PAM type: NRG; PAM sequence: TGG
tggcggtagagggtaggcta

SEQ ID NO: 10544 - DNA, 20 bp, Artificial Sequence
  Description of Artificial Sequence: Synthetic oligonucleotide
  Target: ANGPTL4; (+) strand; PAM type: NRG; PAM sequence: GGG
ggcggtagagggtaggctat

SEQ ID NO: 10545 - DNA, 20 bp, Artificial Sequence
  Description of Artificial Sequence: Synthetic oligonucleotide
  Target: ANGPTL4; (+) strand; PAM type: NRG; PAM sequence: GGG
gcggtagagggtaggctatg

SEQ ID NO: 10546 - DNA, 20 bp, Artificial Sequence
  Description of Artificial Sequence: Synthetic oligonucleotide
  Target: ANGPTL4; (+) strand; PAM type: NRG; PAM sequence: GGG
cggtagagggtaggctatgg

SEQ ID NO: 10547 - DNA, 20 bp, Artificial Sequence
  Description of Artificial Sequence: Synthetic oligonucleotide
  Target: ANGPTL4; (+) strand; PAM type: NRG; PAM sequence: GAG
agagggtaggctatgggggt

SEQ ID NO: 10548 - DNA, 20 bp, Artificial Sequence
  Description of Artificial Sequence: Synthetic oligonucleotide
  Target: ANGPTL4; (+) strand; PAM type: NRG; PAM sequence: AGG
gagggtaggctatgggggtg

SEQ ID NO: 10549 - DNA, 20 bp, Artificial Sequence
  Description of Artificial Sequence: Synthetic oligonucleotide
  Target: ANGPTL4; (+) strand; PAM type: NRG; PAM sequence: AAG
tgggggtgaggccctgatcc

SEQ ID NO: 10550 - DNA, 20 bp, Artificial Sequence
  Description of Artificial Sequence: Synthetic oligonucleotide
  Target: ANGPTL4; (+) strand; PAM type: NRG; PAM sequence: AAG
ctgatccaagtcctgccgct

SEQ ID NO: 10551 - DNA, 20 bp, Artificial Sequence
  Description of Artificial Sequence: Synthetic oligonucleotide
  Target: ANGPTL4; (+) strand; PAM type: NRG; PAM sequence: AGG
tgatccaagtcctgccgcta

SEQ ID NO: 10552 - DNA, 20 bp, Artificial Sequence
  Description of Artificial Sequence: Synthetic oligonucleotide
  Target: ANGPTL4; (+) strand; PAM type: NRG; PAM sequence: CGG
cgctaaggcactcataattt

SEQ ID NO: 10553 - DNA, 20 bp, Artificial Sequence
  Description of Artificial Sequence: Synthetic oligonucleotide
  Target: ANGPTL4; (+) strand; PAM type: NRG; PAM sequence: GGG
gctaaggcactcataatttc

SEQ ID NO: 10554 - DNA, 20 bp, Artificial Sequence
  Description of Artificial Sequence: Synthetic oligonucleotide
  Target: ANGPTL4; (+) strand; PAM type: NRG; PAM sequence: CAG
ggcactcataatttcgggct

SEQ ID NO: 10555 - DNA, 20 bp, Artificial Sequence
  Description of Artificial Sequence: Synthetic oligonucleotide
  Target: ANGPTL4; (+) strand; PAM type: NRG; PAM sequence: AGG
gcactcataatttcgggctc

SEQ ID NO: 10556 - DNA, 20 bp, Artificial Sequence
  Description of Artificial Sequence: Synthetic oligonucleotide
  Target: ANGPTL4; (+) strand; PAM type: NRG; PAM sequence: GGG
cactcataatttcgggctca

SEQ ID NO: 10557 - DNA, 20 bp, Artificial Sequence
  Description of Artificial Sequence: Synthetic oligonucleotide
  Target: ANGPTL4; (+) strand; PAM type: NRG; PAM sequence: GGG
actcataatttcgggctcag

SEQ ID NO: 10558 - DNA, 20 bp, Artificial Sequence
  Description of Artificial Sequence: Synthetic oligonucleotide
  Target: ANGPTL4; (+) strand; PAM type: NRG; PAM sequence: GAG
tcataatttcgggctcaggg

SEQ ID NO: 10559 - DNA, 20 bp, Artificial Sequence
  Description of Artificial Sequence: Synthetic oligonucleotide
  Target: ANGPTL4; (+) strand; PAM type: NRG; PAM sequence: TGG
tttcgggctcaggggagaaa

SEQ ID NO: 10560 - DNA, 20 bp, Artificial Sequence
  Description of Artificial Sequence: Synthetic oligonucleotide
  Target: ANGPTL4; (+) strand; PAM type: NRG; PAM sequence: AAG
cgggctcaggggagaaatgg

SEQ ID NO: 10561 - DNA, 20 bp, Artificial Sequence
  Description of Artificial Sequence: Synthetic oligonucleotide
  Target: ANGPTL4; (+) strand; PAM type: NRG; PAM sequence: AAG
caggggagaaatggaagtca

SEQ ID NO: 10562 - DNA, 20 bp, Artificial Sequence
  Description of Artificial Sequence: Synthetic oligonucleotide
  Target: ANGPTL4; (+) strand; PAM type: NRG; PAM sequence: CAG
gtcaaagaatctcataaaca

SEQ ID NO: 10563 - DNA, 20 bp, Artificial Sequence
  Description of Artificial Sequence: Synthetic oligonucleotide
  Target: ANGPTL4; (+) strand; PAM type: NRG; PAM sequence: CGG
tgcgatgacgaaccctttca

SEQ ID NO: 10564 - DNA, 20 bp, Artificial Sequence
  Description of Artificial Sequence: Synthetic oligonucleotide
  Target: ANGPTL4; (+) strand; PAM type: NRG; PAM sequence: GGG
gcgatgacgaaccctttcac

SEQ ID NO: 10565 - DNA, 20 bp, Artificial Sequence
  Description of Artificial Sequence: Synthetic oligonucleotide
  Target: ANGPTL4; (+) strand; PAM type: NRG; PAM sequence: AAG
atgacgaaccctttcacggg

SEQ ID NO: 10566 - DNA, 20 bp, Artificial Sequence
  Description of Artificial Sequence: Synthetic oligonucleotide
  Target: ANGPTL4; (+) strand; PAM type: NRG; PAM sequence: AGG
tgacgaaccctttcacggga

SEQ ID NO: 10567 - DNA, 20 bp, Artificial Sequence
  Description of Artificial Sequence: Synthetic oligonucleotide
  Target: ANGPTL4; (+) strand; PAM type: NRG; PAM sequence: GAG
tttcacgggaaggaacatgc

SEQ ID NO: 10568 - DNA, 20 bp, Artificial Sequence
  Description of Artificial Sequence: Synthetic oligonucleotide
  Target: ANGPTL4; (+) strand; PAM type: NRG; PAM sequence: CAG
cgggaaggaacatgcgagcc

SEQ ID NO: 10569 - DNA, 20 bp, Artificial Sequence
  Description of Artificial Sequence: Synthetic oligonucleotide
  Target: ANGPTL4; (+) strand; PAM type: NRG; PAM sequence: AAG
aggaacatgcgagcccagaa

SEQ ID NO: 10570 - DNA, 20 bp, Artificial Sequence
  Description of Artificial Sequence: Synthetic oligonucleotide
  Target: ANGPTL4; (+) strand; PAM type: NRG; PAM sequence: TGG
gagcccagaaaagtctctcc

SEQ ID NO: 10571 - DNA, 20 bp, Artificial Sequence
  Description of Artificial Sequence: Synthetic oligonucleotide
  Target: ANGPTL4; (+) strand; PAM type: NRG; PAM sequence: TGG
agaaaagtctctcctggtct

SEQ ID NO: 10572 - DNA, 20 bp, Artificial Sequence
  Description of Artificial Sequence: Synthetic oligonucleotide
  Target: ANGPTL4; (+) strand; PAM type: NRG; PAM sequence: GGG
gaaaagtctctcctggtctt

SEQ ID NO: 10573 - DNA, 20 bp, Artificial Sequence
  Description of Artificial Sequence: Synthetic oligonucleotide
  Target: ANGPTL4; (+) strand; PAM type: NRG; PAM sequence: TGG
agtctctcctggtcttggga

SEQ ID NO: 10574 - DNA, 20 bp, Artificial Sequence
  Description of Artificial Sequence: Synthetic oligonucleotide
  Target: ANGPTL4; (+) strand; PAM type: NRG; PAM sequence: GAG
tctctcctggtcttgggatg

SEQ ID NO: 10575 - DNA, 20 bp, Artificial Sequence
  Description of Artificial Sequence: Synthetic oligonucleotide
  Target: ANGPTL4; (+) strand; PAM type: NRG; PAM sequence: AGG
ctctcctggtcttgggatgg

SEQ ID NO: 10576 - DNA, 20 bp, Artificial Sequence
  Description of Artificial Sequence: Synthetic oligonucleotide
  Target: ANGPTL4; (+) strand; PAM type: NRG; PAM sequence: AAG
cttgggatggaggtcacacg

SEQ ID NO: 10577 - DNA, 20 bp, Artificial Sequence
  Description of Artificial Sequence: Synthetic oligonucleotide
  Target: ANGPTL4; (+) strand; PAM type: NRG; PAM sequence: AAG
aggtcacacgaagcctccgc

SEQ ID NO: 10578 - DNA, 20 bp, Artificial Sequence
  Description of Artificial Sequence: Synthetic oligonucleotide
  Target: ANGPTL4; (+) strand; PAM type: NRG; PAM sequence: AGG
ggtcacacgaagcctccgca

SEQ ID NO: 10579 - DNA, 20 bp, Artificial Sequence
  Description of Artificial Sequence: Synthetic oligonucleotide
  Target: ANGPTL4; (+) strand; PAM type: NRG; PAM sequence: AAG
acacgaagcctccgcaaggc

SEQ ID NO: 10580 - DNA, 20 bp, Artificial Sequence
  Description of Artificial Sequence: Synthetic oligonucleotide
  Target: ANGPTL4; (+) strand; PAM type: NRG; PAM sequence: AGG
cacgaagcctccgcaaggca

SEQ ID NO: 10581 - DNA, 20 bp, Artificial Sequence
  Description of Artificial Sequence: Synthetic oligonucleotide
  Target: ANGPTL4; (+) strand; PAM type: NRG; PAM sequence: TGG
ctccgcaaggcaaggacttt

SEQ ID NO: 10582 - DNA, 20 bp, Artificial Sequence
  Description of Artificial Sequence: Synthetic oligonucleotide
  Target: ANGPTL4; (+) strand; PAM type: NRG; PAM sequence: GAG
gcaaggcaaggacttttggt

SEQ ID NO: 10583 - DNA, 20 bp, Artificial Sequence
  Description of Artificial Sequence: Synthetic oligonucleotide
  Target: ANGPTL4; (+) strand; PAM type: NRG; PAM sequence: CGG
caaggacttttggtgagttc

SEQ ID NO: 10584 - DNA, 20 bp, Artificial Sequence
  Description of Artificial Sequence: Synthetic oligonucleotide
  Target: ANGPTL4; (+) strand; PAM type: NRG; PAM sequence: GGG
aaggacttttggtgagttcc

SEQ ID NO: 10585 - DNA, 20 bp, Artificial Sequence
  Description of Artificial Sequence: Synthetic oligonucleotide
  Target: ANGPTL4; (+) strand; PAM type: NRG; PAM sequence: CAG
gttccgggctccgctgaact

SEQ ID NO: 10586 - DNA, 20 bp, Artificial Sequence
  Description of Artificial Sequence: Synthetic oligonucleotide
  Target: ANGPTL4; (+) strand; PAM type: NRG; PAM sequence: GAG
cttttctcttctttcatttt

SEQ ID NO: 10587 - DNA, 20 bp, Artificial Sequence
  Description of Artificial Sequence: Synthetic oligonucleotide
  Target: ANGPTL4; (+) strand; PAM type: NRG; PAM sequence: TGG
tttcattttgagacgtactc

SEQ ID NO: 10588 - DNA, 20 bp, Artificial Sequence
  Description of Artificial Sequence: Synthetic oligonucleotide
  Target: ANGPTL4; (+) strand; PAM type: NRG; PAM sequence: CAG
cgtactctggctctgtcgcc

SEQ ID NO: 10589 - DNA, 20 bp, Artificial Sequence
  Description of Artificial Sequence: Synthetic oligonucleotide
  Target: ANGPTL4; (+) strand; PAM type: NRG; PAM sequence: AGG
gtactctggctctgtcgccc

SEQ ID NO: 10590 - DNA, 20 bp, Artificial Sequence
  Description of Artificial Sequence: Synthetic oligonucleotide
  Target: ANGPTL4; (+) strand; PAM type: NRG; PAM sequence: TGG
tctggctctgtcgcccaggc

SEQ ID NO: 10591 - DNA, 20 bp, Artificial Sequence
  Description of Artificial Sequence: Synthetic oligonucleotide
  Target: ANGPTL4; (+) strand; PAM type: NRG; PAM sequence: GAG
tggctctgtcgcccaggctg

SEQ ID NO: 10592 - DNA, 20 bp, Artificial Sequence
  Description of Artificial Sequence: Synthetic oligonucleotide
  Target: ANGPTL4; (+) strand; PAM type: NRG; PAM sequence: TGG
tcgcccaggctggagcgcaa

SEQ ID NO: 10593 - DNA, 20 bp, Artificial Sequence
  Description of Artificial Sequence: Synthetic oligonucleotide
  Target: ANGPTL4; (+) strand; PAM type: NRG; PAM sequence: CGG
ggagcgcaatggcgccatct

SEQ ID NO: 10594 - DNA, 20 bp, Artificial Sequence
  Description of Artificial Sequence: Synthetic oligonucleotide
  Target: ANGPTL4; (+) strand; PAM type: NRG; PAM sequence: CGG
gcactgcaacctccacctcc

SEQ ID NO: 10595 - DNA, 20 bp, Artificial Sequence
  Description of Artificial Sequence: Synthetic oligonucleotide
  Target: ANGPTL4; (+) strand; PAM type: NRG; PAM sequence: GGG
cactgcaacctccacctccc

SEQ ID NO: 10596 - DNA, 20 bp, Artificial Sequence
  Description of Artificial Sequence: Synthetic oligonucleotide
  Target: ANGPTL4; (+) strand; PAM type: NRG; PAM sequence: AAG
aacctccacctcccgggttc

SEQ ID NO: 10597 - DNA, 20 bp, Artificial Sequence
  Description of Artificial Sequence: Synthetic oligonucleotide
  Target: ANGPTL4; (+) strand; PAM type: NRG; PAM sequence: CAG
ttcaagcgattctactgcct

SEQ ID NO: 10598 - DNA, 20 bp, Artificial Sequence
  Description of Artificial Sequence: Synthetic oligonucleotide
  Target: ANGPTL4; (+) strand; PAM type: NRG; PAM sequence: GAG
ttctactgcctcagcctccc

SEQ ID NO: 10599 - DNA, 20 bp, Artificial Sequence
  Description of Artificial Sequence: Synthetic oligonucleotide
  Target: ANGPTL4; (+) strand; PAM type: NRG; PAM sequence: TAG
tactgcctcagcctcccgag

SEQ ID NO: 10600 - DNA, 20 bp, Artificial Sequence
  Description of Artificial Sequence: Synthetic oligonucleotide
  Target: ANGPTL4; (+) strand; PAM type: NRG; PAM sequence: TGG
gcctcagcctcccgagtagc

SEQ ID NO: 10601 - DNA, 20 bp, Artificial Sequence
  Description of Artificial Sequence: Synthetic oligonucleotide
  Target: ANGPTL4; (+) strand; PAM type: NRG; PAM sequence: GGG
cctcagcctcccgagtagct

SEQ ID NO: 10602 - DNA, 20 bp, Artificial Sequence
  Description of Artificial Sequence: Synthetic oligonucleotide
  Target: ANGPTL4; (+) strand; PAM type: NRG; PAM sequence: CAG
ctcccgagtagctgggacta

SEQ ID NO: 10603 - DNA, 20 bp, Artificial Sequence
  Description of Artificial Sequence: Synthetic oligonucleotide
  Target: ANGPTL4; (+) strand; PAM type: NRG; PAM sequence: AGG
tcccgagtagctgggactac

SEQ ID NO: 10604 - DNA, 20 bp, Artificial Sequence
  Description of Artificial Sequence: Synthetic oligonucleotide
  Target: ANGPTL4; (+) strand; PAM type: NRG; PAM sequence: AAG
gactacaggcgcgcactacc

SEQ ID NO: 10605 - DNA, 20 bp, Artificial Sequence
  Description of Artificial Sequence: Synthetic oligonucleotide
  Target: ANGPTL4; (+) strand; PAM type: NRG; PAM sequence: CGG
caggcgcgcactaccaagcc

SEQ ID NO: 10606 - DNA, 20 bp, Artificial Sequence
  Description of Artificial Sequence: Synthetic oligonucleotide
  Target: ANGPTL4; (+) strand; PAM type: NRG; PAM sequence: TAG
ctaatttttttttgtatttt

SEQ ID NO: 10607 - DNA, 20 bp, Artificial Sequence
  Description of Artificial Sequence: Synthetic oligonucleotide
  Target: ANGPTL4; (+) strand; PAM type: NRG; PAM sequence: TAG
atttttttttgtatttttag

SEQ ID NO: 10608 - DNA, 20 bp, Artificial Sequence
  Description of Artificial Sequence: Synthetic oligonucleotide
  Target: ANGPTL4; (+) strand; PAM type: NRG; PAM sequence: GAG
ttttttttgtatttttagta

SEQ ID NO: 10609 - DNA, 20 bp, Artificial Sequence
  Description of Artificial Sequence: Synthetic oligonucleotide
  Target: ANGPTL4; (+) strand; PAM type: NRG; PAM sequence: TGG
tttgtatttttagtagagac

SEQ ID NO: 10610 - DNA, 20 bp, Artificial Sequence
  Description of Artificial Sequence: Synthetic oligonucleotide
  Target: ANGPTL4; (+) strand; PAM type: NRG; PAM sequence: GGG
ttgtatttttagtagagact

SEQ ID NO: 10611 - DNA, 20 bp, Artificial Sequence
  Description of Artificial Sequence: Synthetic oligonucleotide
  Target: ANGPTL4; (+) strand; PAM type: NRG; PAM sequence: TGG
gagactgggtttcacgatgt

SEQ ID NO: 10612 - DNA, 20 bp, Artificial Sequence
  Description of Artificial Sequence: Synthetic oligonucleotide
  Target: ANGPTL4; (+) strand; PAM type: NRG; PAM sequence: CGG
ctgggtttcacgatgttggc

SEQ ID NO: 10613 - DNA, 20 bp, Artificial Sequence
  Description of Artificial Sequence: Synthetic oligonucleotide
  Target: ANGPTL4; (+) strand; PAM type: NRG; PAM sequence: GGG
tgggtttcacgatgttggcc

SEQ ID NO: 10614 - DNA, 20 bp, Artificial Sequence
  Description of Artificial Sequence: Synthetic oligonucleotide
  Target: ANGPTL4; (+) strand; PAM type: NRG; PAM sequence: TGG
tttcacgatgttggccgggc

SEQ ID NO: 10615 - DNA, 20 bp, Artificial Sequence
  Description of Artificial Sequence: Synthetic oligonucleotide
  Target: ANGPTL4; (+) strand; PAM type: NRG; PAM sequence: TGG
cgatgttggccgggctggtc

SEQ ID NO: 10616 - DNA, 20 bp, Artificial Sequence
  Description of Artificial Sequence: Synthetic oligonucleotide
  Target: ANGPTL4; (+) strand; PAM type: NRG; PAM sequence: AAG
tgttggccgggctggtctgg

SEQ ID NO: 10617 - DNA, 20 bp, Artificial Sequence
  Description of Artificial Sequence: Synthetic oligonucleotide
  Target: ANGPTL4; (+) strand; PAM type: NRG; PAM sequence: AAG
ggtctggaagtcttgacctc

SEQ ID NO: 10618 - DNA, 20 bp, Artificial Sequence
  Description of Artificial Sequence: Synthetic oligonucleotide
  Target: ANGPTL4; (+) strand; PAM type: NRG; PAM sequence: TGG
gcgtgcgccctctccgccac

SEQ ID NO: 10619 - DNA, 20 bp, Artificial Sequence
  Description of Artificial Sequence: Synthetic oligonucleotide
  Target: ANGPTL4; (+) strand; PAM type: NRG; PAM sequence: GGG
cgtgcgccctctccgccact

SEQ ID NO: 10620 - DNA, 20 bp, Artificial Sequence
  Description of Artificial Sequence: Synthetic oligonucleotide
  Target: ANGPTL4; (+) strand; PAM type: NRG; PAM sequence: AAG
cgccctctccgccactgggt

SEQ ID NO: 10621 - DNA, 20 bp, Artificial Sequence
  Description of Artificial Sequence: Synthetic oligonucleotide
  Target: ANGPTL4; (+) strand; PAM type: NRG; PAM sequence: AGG
gccctctccgccactgggta

SEQ ID NO: 10622 - DNA, 20 bp, Artificial Sequence
  Description of Artificial Sequence: Synthetic oligonucleotide
  Target: ANGPTL4; (+) strand; PAM type: NRG; PAM sequence: CGG
ctctccgccactgggtaagg

SEQ ID NO: 10623 - DNA, 20 bp, Artificial Sequence
  Description of Artificial Sequence: Synthetic oligonucleotide
  Target: ANGPTL4; (+) strand; PAM type: NRG; PAM sequence: GGG
tctccgccactgggtaaggc

SEQ ID NO: 10624 - DNA, 20 bp, Artificial Sequence
  Description of Artificial Sequence: Synthetic oligonucleotide
  Target: ANGPTL4; (+) strand; PAM type: NRG; PAM sequence: GGG
ctccgccactgggtaaggcg

SEQ ID NO: 10625 - DNA, 20 bp, Artificial Sequence
  Description of Artificial Sequence: Synthetic oligonucleotide
  Target: ANGPTL4; (+) strand; PAM type: NRG; PAM sequence: GGG
tccgccactgggtaaggcgg

SEQ ID NO: 10626 - DNA, 20 bp, Artificial Sequence
  Description of Artificial Sequence: Synthetic oligonucleotide
  Target: ANGPTL4; (+) strand; PAM type: NRG; PAM sequence: CGG
gccactgggtaaggcggggg

SEQ ID NO: 10627 - DNA, 20 bp, Artificial Sequence
  Description of Artificial Sequence: Synthetic oligonucleotide
  Target: ANGPTL4; (+) strand; PAM type: NRG; PAM sequence: TAG
tgggtaaggcgggggcggaa

SEQ ID NO: 10628 - DNA, 20 bp, Artificial Sequence
  Description of Artificial Sequence: Synthetic oligonucleotide
  Target: ANGPTL4; (+) strand; PAM type: NRG; PAM sequence: AGG
gggtaaggcgggggcggaat

SEQ ID NO: 10629 - DNA, 20 bp, Artificial Sequence
  Description of Artificial Sequence: Synthetic oligonucleotide
  Target: ANGPTL4; (+) strand; PAM type: NRG; PAM sequence: GGG
ggtaaggcgggggcggaata

SEQ ID NO: 10630 - DNA, 20 bp, Artificial Sequence
  Description of Artificial Sequence: Synthetic oligonucleotide
  Target: ANGPTL4; (+) strand; PAM type: NRG; PAM sequence: GGG
gtaaggcgggggcggaatag

SEQ ID NO: 10631 - DNA, 20 bp, Artificial Sequence
  Description of Artificial Sequence: Synthetic oligonucleotide
  Target: ANGPTL4; (+) strand; PAM type: NRG; PAM sequence: GGG
taaggcgggggcggaatagg

SEQ ID NO: 10632 - DNA, 20 bp, Artificial Sequence
  Description of Artificial Sequence: Synthetic oligonucleotide
  Target: ANGPTL4; (+) strand; PAM type: NRG; PAM sequence: TAG
gggggcttgcaatttcacac

SEQ ID NO: 10633 - DNA, 20 bp, Artificial Sequence
  Description of Artificial Sequence: Synthetic oligonucleotide
  Target: ANGPTL4; (+) strand; PAM type: NRG; PAM sequence: GAG
gggcttgcaatttcacacta

SEQ ID NO: 10634 - DNA, 20 bp, Artificial Sequence
  Description of Artificial Sequence: Synthetic oligonucleotide
  Target: ANGPTL4; (+) strand; PAM type: NRG; PAM sequence: AGG
ggcttgcaatttcacactag

SEQ ID NO: 10635 - DNA, 20 bp, Artificial Sequence
  Description of Artificial Sequence: Synthetic oligonucleotide
  Target: ANGPTL4; (+) strand; PAM type: NRG; PAM sequence: CGG
ttgcaatttcacactagagg

SEQ ID NO: 10636 - DNA, 20 bp, Artificial Sequence
  Description of Artificial Sequence: Synthetic oligonucleotide
  Target: ANGPTL4; (+) strand; PAM type: NRG; PAM sequence: GGG
tgcaatttcacactagaggc

SEQ ID NO: 10637 - DNA, 20 bp, Artificial Sequence
  Description of Artificial Sequence: Synthetic oligonucleotide
  Target: ANGPTL4; (+) strand; PAM type: NRG; PAM sequence: TGG
cacactagaggcgggcaccg

SEQ ID NO: 10638 - DNA, 20 bp, Artificial Sequence
  Description of Artificial Sequence: Synthetic oligonucleotide
  Target: ANGPTL4; (+) strand; PAM type: NRG; PAM sequence: GGG
acactagaggcgggcaccgt

SEQ ID NO: 10639 - DNA, 20 bp, Artificial Sequence
  Description of Artificial Sequence: Synthetic oligonucleotide
  Target: ANGPTL4; (+) strand; PAM type: NRG; PAM sequence: GGG
cactagaggcgggcaccgtg

SEQ ID NO: 10640 - DNA, 20 bp, Artificial Sequence
  Description of Artificial Sequence: Synthetic oligonucleotide
  Target: ANGPTL4; (+) strand; PAM type: NRG; PAM sequence: GGG
actagaggcgggcaccgtgg

SEQ ID NO: 10641 - DNA, 20 bp, Artificial Sequence
  Description of Artificial Sequence: Synthetic oligonucleotide
  Target: ANGPTL4; (+) strand; PAM type: NRG; PAM sequence: AAG
gaggcgggcaccgtggggga

SEQ ID NO: 10642 - DNA, 20 bp, Artificial Sequence
  Description of Artificial Sequence: Synthetic oligonucleotide
  Target: ANGPTL4; (+) strand; PAM type: NRG; PAM sequence: AAG
gcgggcaccgtgggggaaag

SEQ ID NO: 10643 - DNA, 20 bp, Artificial Sequence
  Description of Artificial Sequence: Synthetic oligonucleotide
  Target: ANGPTL4; (+) strand; PAM type: NRG; PAM sequence: GAG
gggcaccgtgggggaaagaa

SEQ ID NO: 10644 - DNA, 20 bp, Artificial Sequence
  Description of Artificial Sequence: Synthetic oligonucleotide
  Target: ANGPTL4; (+) strand; PAM type: NRG; PAM sequence: CGG
aagaagagtcacgtctccca

SEQ ID NO: 10645 - DNA, 20 bp, Artificial Sequence
  Description of Artificial Sequence: Synthetic oligonucleotide
  Target: ANGPTL4; (+) strand; PAM type: NRG; PAM sequence: TAG
gtcacgtctcccacggttcg

SEQ ID NO: 10646 - DNA, 20 bp, Artificial Sequence
  Description of Artificial Sequence: Synthetic oligonucleotide
  Target: ANGPTL4; (+) strand; PAM type: NRG; PAM sequence: GAG
cacgtctcccacggttcgta

SEQ ID NO: 10647 - DNA, 20 bp, Artificial Sequence
  Description of Artificial Sequence: Synthetic oligonucleotide
  Target: ANGPTL4; (+) strand; PAM type: NRG; PAM sequence: AGG
acgtctcccacggttcgtag

SEQ ID NO: 10648 - DNA, 20 bp, Artificial Sequence
  Description of Artificial Sequence: Synthetic oligonucleotide
  Target: ANGPTL4; (+) strand; PAM type: NRG; PAM sequence: AAG
tctcccacggttcgtagagg

SEQ ID NO: 10649 - DNA, 20 bp, Artificial Sequence
  Description of Artificial Sequence: Synthetic oligonucleotide
  Target: ANGPTL4; (+) strand; PAM type: NRG; PAM sequence: AGG
ctcccacggttcgtagagga

SEQ ID NO: 10650 - DNA, 20 bp, Artificial Sequence
  Description of Artificial Sequence: Synthetic oligonucleotide
  Target: ANGPTL4; (+) strand; PAM type: NRG; PAM sequence: GAG
tcgtagaggaaggcctgcct

SEQ ID NO: 10651 - DNA, 20 bp, Artificial Sequence
  Description of Artificial Sequence: Synthetic oligonucleotide
  Target: ANGPTL4; (+) strand; PAM type: NRG; PAM sequence: TGG
gaggaaggcctgcctgagcc

SEQ ID NO: 10652 - DNA, 20 bp, Artificial Sequence
  Description of Artificial Sequence: Synthetic oligonucleotide
  Target: ANGPTL4; (+) strand; PAM type: NRG; PAM sequence: GAG
ggaaggcctgcctgagcctg

SEQ ID NO: 10653 - DNA, 20 bp, Artificial Sequence
  Description of Artificial Sequence: Synthetic oligonucleotide
  Target: ANGPTL4; (+) strand; PAM type: NRG; PAM sequence: CGG
aggcctgcctgagcctggag

SEQ ID NO: 10654 - DNA, 20 bp, Artificial Sequence
  Description of Artificial Sequence: Synthetic oligonucleotide
  Target: ANGPTL4; (+) strand; PAM type: NRG; PAM sequence: GGG
ggcctgcctgagcctggagc

SEQ ID NO: 10655 - DNA, 20 bp, Artificial Sequence
  Description of Artificial Sequence: Synthetic oligonucleotide
  Target: ANGPTL4; (+) strand; PAM type: NRG; PAM sequence: GGG
gcctgcctgagcctggagcg

SEQ ID NO: 10656 - DNA, 20 bp, Artificial Sequence
  Description of Artificial Sequence: Synthetic oligonucleotide
  Target: ANGPTL4; (+) strand; PAM type: NRG; PAM sequence: GGG
cctgcctgagcctggagcgg

SEQ ID NO: 10657 - DNA, 20 bp, Artificial Sequence
  Description of Artificial Sequence: Synthetic oligonucleotide
  Target: ANGPTL4; (+) strand; PAM type: NRG; PAM sequence: CGG
gcctgagcctggagcggggg

SEQ ID NO: 10658 - DNA, 20 bp, Artificial Sequence
  Description of Artificial Sequence: Synthetic oligonucleotide
  Target: ANGPTL4; (+) strand; PAM type: NRG; PAM sequence: GGG
cctgagcctggagcgggggc

SEQ ID NO: 10659 - DNA, 20 bp, Artificial Sequence
  Description of Artificial Sequence: Synthetic oligonucleotide
  Target: ANGPTL4; (+) strand; PAM type: NRG; PAM sequence: GAG
tgagcctggagcgggggcgg

SEQ ID NO: 10660 - DNA, 20 bp, Artificial Sequence
  Description of Artificial Sequence: Synthetic oligonucleotide
  Target: ANGPTL4; (+) strand; PAM type: NRG; PAM sequence: GAG
agcctggagcgggggcggga

SEQ ID NO: 10661 - DNA, 20 bp, Artificial Sequence
  Description of Artificial Sequence: Synthetic oligonucleotide
  Target: ANGPTL4; (+) strand; PAM type: NRG; PAM sequence: CAG
gagcgggggcgggagagcca

SEQ ID NO: 10662 - DNA, 20 bp, Artificial Sequence
  Description of Artificial Sequence: Synthetic oligonucleotide
  Target: ANGPTL4; (+) strand; PAM type: NRG; PAM sequence: TGG
ggggcgggagagccacagtt

SEQ ID NO: 10663 - DNA, 20 bp, Artificial Sequence
  Description of Artificial Sequence: Synthetic oligonucleotide
  Target: ANGPTL4; (+) strand; PAM type: NRG; PAM sequence: CAG
gagccacagtttggcatccc

SEQ ID NO: 10664 - DNA, 20 bp, Artificial Sequence
  Description of Artificial Sequence: Synthetic oligonucleotide
  Target: ANGPTL4; (+) strand; PAM type: NRG; PAM sequence: AGG
agccacagtttggcatcccc

SEQ ID NO: 10665 - DNA, 20 bp, Artificial Sequence
  Description of Artificial Sequence: Synthetic oligonucleotide
  Target: ANGPTL4; (+) strand; PAM type: NRG; PAM sequence: GGG
gccacagtttggcatcccca

SEQ ID NO: 10666 - DNA, 20 bp, Artificial Sequence
  Description of Artificial Sequence: Synthetic oligonucleotide
  Target: ANGPTL4; (+) strand; PAM type: NRG; PAM sequence: CAG
ggcatccccagggcatcccc

SEQ ID NO: 10667 - DNA, 20 bp, Artificial Sequence
  Description of Artificial Sequence: Synthetic oligonucleotide
  Target: ANGPTL4; (+) strand; PAM type: NRG; PAM sequence: CAG
ccagggcatcccccagcccg

SEQ ID NO: 10668 - DNA, 20 bp, Artificial Sequence
  Description of Artificial Sequence: Synthetic oligonucleotide
  Target: ANGPTL4; (+) strand; PAM type: NRG; PAM sequence: CAG
tcccccagcccgcagactac

SEQ ID NO: 10669 - DNA, 20 bp, Artificial Sequence
  Description of Artificial Sequence: Synthetic oligonucleotide
  Target: ANGPTL4; (+) strand; PAM type: NRG; PAM sequence: AGG
cccccagcccgcagactacc

SEQ ID NO: 10670 - DNA, 20 bp, Artificial Sequence
  Description of Artificial Sequence: Synthetic oligonucleotide
  Target: ANGPTL4; (+) strand; PAM type: NRG; PAM sequence: CAG
cccgcagactaccaggcctc

SEQ ID NO: 10671 - DNA, 20 bp, Artificial Sequence
  Description of Artificial Sequence: Synthetic oligonucleotide
  Target: ANGPTL4; (+) strand; PAM type: NRG; PAM sequence: GAG
cgcagactaccaggcctcca

SEQ ID NO: 10672 - DNA, 20 bp, Artificial Sequence
  Description of Artificial Sequence: Synthetic oligonucleotide
  Target: ANGPTL4; (+) strand; PAM type: NRG; PAM sequence: AGG
gcagactaccaggcctccag

SEQ ID NO: 10673 - DNA, 20 bp, Artificial Sequence
  Description of Artificial Sequence: Synthetic oligonucleotide
  Target: ANGPTL4; (+) strand; PAM type: NRG; PAM sequence: CAG
actaccaggcctccagagga

SEQ ID NO: 10674 - DNA, 20 bp, Artificial Sequence
  Description of Artificial Sequence: Synthetic oligonucleotide
  Target: ANGPTL4; (+) strand; PAM type: NRG; PAM sequence: AGG
ctaccaggcctccagaggac

SEQ ID NO: 10675 - DNA, 20 bp, Artificial Sequence
  Description of Artificial Sequence: Synthetic oligonucleotide
  Target: ANGPTL4; (+) strand; PAM type: NRG; PAM sequence: CGG
agaggacaggaccccacccc

SEQ ID NO: 10676 - DNA, 20 bp, Artificial Sequence
  Description of Artificial Sequence: Synthetic oligonucleotide
  Target: ANGPTL4; (+) strand; PAM type: NRG; PAM sequence: CAG
caggaccccacccccggcca

SEQ ID NO: 10677 - DNA, 20 bp, Artificial Sequence
  Description of Artificial Sequence: Synthetic oligonucleotide
  Target: ANGPTL4; (+) strand; PAM type: NRG; PAM sequence: AGG
aggaccccacccccggccac

SEQ ID NO: 10678 - DNA, 20 bp, Artificial Sequence
  Description of Artificial Sequence: Synthetic oligonucleotide
  Target: ANGPTL4; (+) strand; PAM type: NRG; PAM sequence: CAG
ccggccacaggccctgcccc

SEQ ID NO: 10679 - DNA, 20 bp, Artificial Sequence
  Description of Artificial Sequence: Synthetic oligonucleotide
  Target: ANGPTL4; (+) strand; PAM type: NRG; PAM sequence: AAG
actccccgcaccccgcctcc

SEQ ID NO: 10680 - DNA, 20 bp, Artificial Sequence
  Description of Artificial Sequence: Synthetic oligonucleotide
  Target: ANGPTL4; (+) strand; PAM type: NRG; PAM sequence: CGG
caacttataaaaaccgtcct

SEQ ID NO: 10681 - DNA, 20 bp, Artificial Sequence
  Description of Artificial Sequence: Synthetic oligonucleotide
  Target: ANGPTL4; (+) strand; PAM type: NRG; PAM sequence: GGG
aacttataaaaaccgtcctc

SEQ ID NO: 10682 - DNA, 20 bp, Artificial Sequence
  Description of Artificial Sequence: Synthetic oligonucleotide
  Target: ANGPTL4; (+) strand; PAM type: NRG; PAM sequence: CGG
ataaaaaccgtcctcgggcg

SEQ ID NO: 10683 - DNA, 20 bp, Artificial Sequence
  Description of Artificial Sequence: Synthetic oligonucleotide
  Target: ANGPTL4; (+) strand; PAM type: NRG; PAM sequence: CGG
aaaaccgtcctcgggcgcgg

SEQ ID NO: 10684 - DNA, 20 bp, Artificial Sequence
  Description of Artificial Sequence: Synthetic oligonucleotide
  Target: ANGPTL4; (+) strand; PAM type: NRG; PAM sequence: GGG
aaaccgtcctcgggcgcggc

SEQ ID NO: 10685 - DNA, 20 bp, Artificial Sequence
  Description of Artificial Sequence: Synthetic oligonucleotide
  Target: ANGPTL4; (+) strand; PAM type: NRG; PAM sequence: GGG
aaccgtcctcgggcgcggcg

SEQ ID NO: 10686 - DNA, 20 bp, Artificial Sequence
  Description of Artificial Sequence: Synthetic oligonucleotide
  Target: ANGPTL4; (+) strand; PAM type: NRG; PAM sequence: GAG
ccgtcctcgggcgcggcggg

SEQ ID NO: 10687 - DNA, 20 bp, Artificial Sequence
  Description of Artificial Sequence: Synthetic oligonucleotide
  Target: ANGPTL4; (+) strand; PAM type: NRG; PAM sequence: AAG
tcctcgggcgcggcggggag

SEQ ID NO: 10688 - DNA, 20 bp, Artificial Sequence
  Description of Artificial Sequence: Synthetic oligonucleotide
  Target: ANGPTL4; (+) strand; PAM type: NRG; PAM sequence: GAG
gggcgcggcggggagaagcc

SEQ ID NO: 10689 - DNA, 20 bp, Artificial Sequence
  Description of Artificial Sequence: Synthetic oligonucleotide
  Target: ANGPTL4; (+) strand; PAM type: NRG; PAM sequence: GAG
cggcggggagaagccgagct

SEQ ID NO: 10690 - DNA, 20 bp, Artificial Sequence
  Description of Artificial Sequence: Synthetic oligonucleotide
  Target: ANGPTL4; (+) strand; PAM type: NRG; PAM sequence: CGG
cggggagaagccgagctgag

SEQ ID NO: 10691 - DNA, 20 bp, Artificial Sequence
  Description of Artificial Sequence: Synthetic oligonucleotide
  Target: ANGPTL4; (+) strand; PAM type: NRG; PAM sequence: CAG
gactgtgatccgattctttc

SEQ ID NO: 10692 - DNA, 20 bp, Artificial Sequence
  Description of Artificial Sequence: Synthetic oligonucleotide
  Target: ANGPTL4; (+) strand; PAM type: NRG; PAM sequence: CGG
tgtgatccgattctttccag

SEQ ID NO: 10693 - DNA, 20 bp, Artificial Sequence
  Description of Artificial Sequence: Synthetic oligonucleotide
  Target: ANGPTL4; (+) strand; PAM type: NRG; PAM sequence: AAG
ttccagcggcttctgcaacc

SEQ ID NO: 10694 - DNA, 20 bp, Artificial Sequence
  Description of Artificial Sequence: Synthetic oligonucleotide
  Target: ANGPTL4; (+) strand; PAM type: NRG; PAM sequence: CGG
cagcggcttctgcaaccaag

SEQ ID NO: 10695 - DNA, 20 bp, Artificial Sequence
  Description of Artificial Sequence: Synthetic oligonucleotide
  Target: ANGPTL4; (+) strand; PAM type: NRG; PAM sequence: GGG
agcggcttctgcaaccaagc

SEQ ID NO: 10696 - DNA, 20 bp, Artificial Sequence
  Description of Artificial Sequence: Synthetic oligonucleotide
  Target: ANGPTL4; (+) strand; PAM type: NRG; PAM sequence: CGG
aaccaagcgggtcttacccc

SEQ ID NO: 10697 - DNA, 20 bp, Artificial Sequence
  Description of Artificial Sequence: Synthetic oligonucleotide
  Target: ANGPTL4; (+) strand; PAM type: NRG; PAM sequence: CAG
cccccggtcctccgcgtctc

SEQ ID NO: 10698 - DNA, 20 bp, Artificial Sequence
  Description of Artificial Sequence: Synthetic oligonucleotide
  Target: ANGPTL4; (+) strand; PAM type: NRG; PAM sequence: TGG
gcgtctccagtcctcgcacc

SEQ ID NO: 10699 - DNA, 20 bp, Artificial Sequence
  Description of Artificial Sequence: Synthetic oligonucleotide
  Target: ANGPTL4; (+) strand; PAM type: NRG; PAM sequence: GAG
cctggaaccccaacgtcccc

SEQ ID NO: 10700 - DNA, 20 bp, Artificial Sequence
  Description of Artificial Sequence: Synthetic oligonucleotide
  Target: ANGPTL4; (+) strand; PAM type: NRG; PAM sequence: GAG
tggaaccccaacgtccccga

SEQ ID NO: 10701 - DNA, 20 bp, Artificial Sequence
  Description of Artificial Sequence: Synthetic oligonucleotide
  Target: ANGPTL4; (+) strand; PAM type: NRG; PAM sequence: CAG
agtccccgaatccccgctcc

SEQ ID NO: 10702 - DNA, 20 bp, Artificial Sequence
  Description of Artificial Sequence: Synthetic oligonucleotide
  Target: ANGPTL4; (+) strand; PAM type: NRG; PAM sequence: AGG
gtccccgaatccccgctccc

SEQ ID NO: 10703 - DNA, 20 bp, Artificial Sequence
  Description of Artificial Sequence: Synthetic oligonucleotide
  Target: ANGPTL4; (+) strand; PAM type: NRG; PAM sequence: AAG
tccccgctcccaggctacct

SEQ ID NO: 10704 - DNA, 20 bp, Artificial Sequence
  Description of Artificial Sequence: Synthetic oligonucleotide
  Target: ANGPTL4; (+) strand; PAM type: NRG; PAM sequence: GAG
cccgctcccaggctacctaa

SEQ ID NO: 10705 - DNA, 20 bp, Artificial Sequence
  Description of Artificial Sequence: Synthetic oligonucleotide
  Target: ANGPTL4; (+) strand; PAM type: NRG; PAM sequence: AGG
ccgctcccaggctacctaag

SEQ ID NO: 10706 - DNA, 20 bp, Artificial Sequence
  Description of Artificial Sequence: Synthetic oligonucleotide
  Target: ANGPTL4; (+) strand; PAM type: NRG; PAM sequence: GAG
cccaggctacctaagaggat

SEQ ID NO: 10707 - DNA, 20 bp, Artificial Sequence
  Description of Artificial Sequence: Synthetic oligonucleotide
  Target: ANGPTL4; (+) strand; PAM type: NRG; PAM sequence: CGG
aggctacctaagaggatgag

SEQ ID NO: 10708 - DNA, 20 bp, Artificial Sequence
  Description of Artificial Sequence: Synthetic oligonucleotide
  Target: ANGPTL4; (+) strand; PAM type: NRG; PAM sequence: CGG
gaggatgagcggtgctccga

SEQ ID NO: 10709 - DNA, 20 bp, Artificial Sequence
  Description of Artificial Sequence: Synthetic oligonucleotide
  Target: ANGPTL4; (+) strand; PAM type: NRG; PAM sequence: CGG
atgagcggtgctccgacggc

SEQ ID NO: 10710 - DNA, 20 bp, Artificial Sequence
  Description of Artificial Sequence: Synthetic oligonucleotide
  Target: ANGPTL4; (+) strand; PAM type: NRG; PAM sequence: GGG
tgagcggtgctccgacggcc

SEQ ID NO: 10711 - DNA, 20 bp, Artificial Sequence
  Description of Artificial Sequence: Synthetic oligonucleotide
  Target: ANGPTL4; (+) strand; PAM type: NRG; PAM sequence: GGG
gagcggtgctccgacggccg

SEQ ID NO: 10712 - DNA, 20 bp, Artificial Sequence
  Description of Artificial Sequence: Synthetic oligonucleotide
  Target: ANGPTL4; (+) strand; PAM type: NRG; PAM sequence: CAG
cggtgctccgacggccgggg

SEQ ID NO: 10713 - DNA, 20 bp, Artificial Sequence
  Description of Artificial Sequence: Synthetic oligonucleotide
  Target: ANGPTL4; (+) strand; PAM type: NRG; PAM sequence: GAG
gccgccaccgccgtgctact

SEQ ID NO: 10714 - DNA, 20 bp, Artificial Sequence
  Description of Artificial Sequence: Synthetic oligonucleotide
  Target: ANGPTL4; (+) strand; PAM type: NRG; PAM sequence: CAG
ccgccgtgctactgagcgct

SEQ ID NO: 10715 - DNA, 20 bp, Artificial Sequence
  Description of Artificial Sequence: Synthetic oligonucleotide
  Target: ANGPTL4; (+) strand; PAM type: NRG; PAM sequence: AGG
cgccgtgctactgagcgctc

SEQ ID NO: 10716 - DNA, 20 bp, Artificial Sequence
  Description of Artificial Sequence: Synthetic oligonucleotide
  Target: ANGPTL4; (+) strand; PAM type: NRG; PAM sequence: GGG
gccgtgctactgagcgctca

SEQ ID NO: 10717 - DNA, 20 bp, Artificial Sequence
  Description of Artificial Sequence: Synthetic oligonucleotide
  Target: ANGPTL4; (+) strand; PAM type: NRG; PAM sequence: CGG
gtgctactgagcgctcaggg

SEQ ID NO: 10718 - DNA, 20 bp, Artificial Sequence
  Description of Artificial Sequence: Synthetic oligonucleotide
  Target: ANGPTL4; (+) strand; PAM type: NRG; PAM sequence: CAG
gcgctcagggcggacccgtg

SEQ ID NO: 10719 - DNA, 20 bp, Artificial Sequence
  Description of Artificial Sequence: Synthetic oligonucleotide
  Target: ANGPTL4; (+) strand; PAM type: NRG; PAM sequence: AAG
agggcggacccgtgcagtcc

SEQ ID NO: 10720 - DNA, 20 bp, Artificial Sequence
  Description of Artificial Sequence: Synthetic oligonucleotide
  Target: ANGPTL4; (+) strand; PAM type: NRG; PAM sequence: TGG
agtcgccgcgctttgcgtcc

SEQ ID NO: 10721 - DNA, 20 bp, Artificial Sequence
  Description of Artificial Sequence: Synthetic oligonucleotide
  Target: ANGPTL4; (+) strand; PAM type: NRG; PAM sequence: GGG
gtcgccgcgctttgcgtcct

SEQ ID NO: 10722 - DNA, 20 bp, Artificial Sequence
  Description of Artificial Sequence: Synthetic oligonucleotide
  Target: ANGPTL4; (+) strand; PAM type: NRG; PAM sequence: GAG
cgcgctttgcgtcctgggac

SEQ ID NO: 10723 - DNA, 20 bp, Artificial Sequence
  Description of Artificial Sequence: Synthetic oligonucleotide
  Target: ANGPTL4; (+) strand; PAM type: NRG; PAM sequence: TGG
ctgggacgagatgaatgtcc

SEQ ID NO: 10724 - DNA, 20 bp, Artificial Sequence
  Description of Artificial Sequence: Synthetic oligonucleotide
  Target: ANGPTL4; (+) strand; PAM type: NRG; PAM sequence: CGG
gagatgaatgtcctggcgca

SEQ ID NO: 10725 - DNA, 20 bp, Artificial Sequence
  Description of Artificial Sequence: Synthetic oligonucleotide
  Target: ANGPTL4; (+) strand; PAM type: NRG; PAM sequence: CAG
tcctggcgcacggactcctg

SEQ ID NO: 10726 - DNA, 20 bp, Artificial Sequence
  Description of Artificial Sequence: Synthetic oligonucleotide
  Target: ANGPTL4; (+) strand; PAM type: NRG; PAM sequence: CGG
gcgcacggactcctgcagct

SEQ ID NO: 10727 - DNA, 20 bp, Artificial Sequence
  Description of Artificial Sequence: Synthetic oligonucleotide
  Target: ANGPTL4; (+) strand; PAM type: NRG; PAM sequence: CAG
acggactcctgcagctcggc

SEQ ID NO: 10728 - DNA, 20 bp, Artificial Sequence
  Description of Artificial Sequence: Synthetic oligonucleotide
  Target: ANGPTL4; (+) strand; PAM type: NRG; PAM sequence: AGG
cggactcctgcagctcggcc

SEQ ID NO: 10729 - DNA, 20 bp, Artificial Sequence
  Description of Artificial Sequence: Synthetic oligonucleotide
  Target: ANGPTL4; (+) strand; PAM type: NRG; PAM sequence: GGG
ggactcctgcagctcggcca

SEQ ID NO: 10730 - DNA, 20 bp, Artificial Sequence
  Description of Artificial Sequence: Synthetic oligonucleotide
  Target: ANGPTL4; (+) strand; PAM type: NRG; PAM sequence: GGG
gactcctgcagctcggccag

SEQ ID NO: 10731 - DNA, 20 bp, Artificial Sequence
  Description of Artificial Sequence: Synthetic oligonucleotide
  Target: ANGPTL4; (+) strand; PAM type: NRG; PAM sequence: CGG
ccaggggctgcgcgaacacg

SEQ ID NO: 10732 - DNA, 20 bp, Artificial Sequence
  Description of Artificial Sequence: Synthetic oligonucleotide
  Target: ANGPTL4; (+) strand; PAM type: NRG; PAM sequence: GAG
aggggctgcgcgaacacgcg

SEQ ID NO: 10733 - DNA, 20 bp, Artificial Sequence
  Description of Artificial Sequence: Synthetic oligonucleotide
  Target: ANGPTL4; (+) strand; PAM type: NRG; PAM sequence: CAG
gaacacgcggagcgcacccg

SEQ ID NO: 10734 - DNA, 20 bp, Artificial Sequence
  Description of Artificial Sequence: Synthetic oligonucleotide
  Target: ANGPTL4; (+) strand; PAM type: NRG; PAM sequence: CAG
acgcggagcgcacccgcagt

SEQ ID NO: 10735 - DNA, 20 bp, Artificial Sequence
  Description of Artificial Sequence: Synthetic oligonucleotide
  Target: ANGPTL4; (+) strand; PAM type: NRG; PAM sequence: GAG
gagcgcacccgcagtcagct

SEQ ID NO: 10736 - DNA, 20 bp, Artificial Sequence
  Description of Artificial Sequence: Synthetic oligonucleotide
  Target: ANGPTL4; (+) strand; PAM type: NRG; PAM sequence: TGG
ccgcagtcagctgagcgcgc

SEQ ID NO: 10737 - DNA, 20 bp, Artificial Sequence
  Description of Artificial Sequence: Synthetic oligonucleotide
  Target: ANGPTL4; (+) strand; PAM type: NRG; PAM sequence: GAG
gcagtcagctgagcgcgctg

SEQ ID NO: 10738 - DNA, 20 bp, Artificial Sequence
  Description of Artificial Sequence: Synthetic oligonucleotide
  Target: ANGPTL4; (+) strand; PAM type: NRG; PAM sequence: CGG
gtcagctgagcgcgctggag

SEQ ID NO: 10739 - DNA, 20 bp, Artificial Sequence
  Description of Artificial Sequence: Synthetic oligonucleotide
  Target: ANGPTL4; (+) strand; PAM type: NRG; PAM sequence: GAG
agcgcgctggagcggcgcct

SEQ ID NO: 10740 - DNA, 20 bp, Artificial Sequence
  Description of Artificial Sequence: Synthetic oligonucleotide
  Target: ANGPTL4; (+) strand; PAM type: NRG; PAM sequence: CGG
gagcggcgcctgagcgcgtg

SEQ ID NO: 10741 - DNA, 20 bp, Artificial Sequence
  Description of Artificial Sequence: Synthetic oligonucleotide
  Target: ANGPTL4; (+) strand; PAM type: NRG; PAM sequence: GGG
agcggcgcctgagcgcgtgc

SEQ ID NO: 10742 - DNA, 20 bp, Artificial Sequence
  Description of Artificial Sequence: Synthetic oligonucleotide
  Target: ANGPTL4; (+) strand; PAM type: NRG; PAM sequence: CAG
gcgcgtgcgggtccgcctgt

SEQ ID NO: 10743 - DNA, 20 bp, Artificial Sequence
  Description of Artificial Sequence: Synthetic oligonucleotide
  Target: ANGPTL4; (+) strand; PAM type: NRG; PAM sequence: AGG
cgcgtgcgggtccgcctgtc

SEQ ID NO: 10744 - DNA, 20 bp, Artificial Sequence
  Description of Artificial Sequence: Synthetic oligonucleotide
  Target: ANGPTL4; (+) strand; PAM type: NRG; PAM sequence: GGG
gcgtgcgggtccgcctgtca

SEQ ID NO: 10745 - DNA, 20 bp, Artificial Sequence
  Description of Artificial Sequence: Synthetic oligonucleotide
  Target: ANGPTL4; (+) strand; PAM type: NRG; PAM sequence: GAG
ggtccgcctgtcagggaacc

SEQ ID NO: 10746 - DNA, 20 bp, Artificial Sequence
  Description of Artificial Sequence: Synthetic oligonucleotide
  Target: ANGPTL4; (+) strand; PAM type: NRG; PAM sequence: AGG
gtccgcctgtcagggaaccg

SEQ ID NO: 10747 - DNA, 20 bp, Artificial Sequence
  Description of Artificial Sequence: Synthetic oligonucleotide
  Target: ANGPTL4; (+) strand; PAM type: NRG; PAM sequence: GGG
tccgcctgtcagggaaccga

SEQ ID NO: 10748 - DNA, 20 bp, Artificial Sequence
  Description of Artificial Sequence: Synthetic oligonucleotide
  Target: ANGPTL4; (+) strand; PAM type: NRG; PAM sequence: GGG
ccgcctgtcagggaaccgag

SEQ ID NO: 10749 - DNA, 20 bp, Artificial Sequence
  Description of Artificial Sequence: Synthetic oligonucleotide
  Target: ANGPTL4; (+) strand; PAM type: NRG; PAM sequence: TAG
ggggtccaccgacctcccgt

SEQ ID NO: 10750 - DNA, 20 bp, Artificial Sequence
  Description of Artificial Sequence: Synthetic oligonucleotide
  Target: ANGPTL4; (+) strand; PAM type: NRG; PAM sequence: GAG
ccgacctcccgttagcccct

SEQ ID NO: 10751 - DNA, 20 bp, Artificial Sequence
  Description of Artificial Sequence: Synthetic oligonucleotide
  Target: ANGPTL4; (+) strand; PAM type: NRG; PAM sequence: GAG
gacctcccgttagcccctga

SEQ ID NO: 10752 - DNA, 20 bp, Artificial Sequence
  Description of Artificial Sequence: Synthetic oligonucleotide
  Target: ANGPTL4; (+) strand; PAM type: NRG; PAM sequence: CGG
tcccgttagcccctgagagc

SEQ ID NO: 10753 - DNA, 20 bp, Artificial Sequence
  Description of Artificial Sequence: Synthetic oligonucleotide
  Target: ANGPTL4; (+) strand; PAM type: NRG; PAM sequence: GGG
cccgttagcccctgagagcc

SEQ ID NO: 10754 - DNA, 20 bp, Artificial Sequence
  Description of Artificial Sequence: Synthetic oligonucleotide
  Target: ANGPTL4; (+) strand; PAM type: NRG; PAM sequence: TGG
gttagcccctgagagccggg

SEQ ID NO: 10755 - DNA, 20 bp, Artificial Sequence
  Description of Artificial Sequence: Synthetic oligonucleotide
  Target: ANGPTL4; (+) strand; PAM type: NRG; PAM sequence: GAG
ctgagagccgggtggaccct

SEQ ID NO: 10756 - DNA, 20 bp, Artificial Sequence
  Description of Artificial Sequence: Synthetic oligonucleotide
  Target: ANGPTL4; (+) strand; PAM type: NRG; PAM sequence: AGG
tgagagccgggtggaccctg

SEQ ID NO: 10757 - DNA, 20 bp, Artificial Sequence
  Description of Artificial Sequence: Synthetic oligonucleotide
  Target: ANGPTL4; (+) strand; PAM type: NRG; PAM sequence: CAG
gtggaccctgaggtccttca

SEQ ID NO: 10758 - DNA, 20 bp, Artificial Sequence
  Description of Artificial Sequence: Synthetic oligonucleotide
  Target: ANGPTL4; (+) strand; PAM type: NRG; PAM sequence: CAG
ctgaggtccttcacagcctg

SEQ ID NO: 10759 - DNA, 20 bp, Artificial Sequence
  Description of Artificial Sequence: Synthetic oligonucleotide
  Target: ANGPTL4; (+) strand; PAM type: NRG; PAM sequence: AGG
tgaggtccttcacagcctgc

SEQ ID NO: 10760 - DNA, 20 bp, Artificial Sequence
  Description of Artificial Sequence: Synthetic oligonucleotide
  Target: ANGPTL4; (+) strand; PAM type: NRG; PAM sequence: CAG
agcctgcaggtacgtgtccc

SEQ ID NO: 10761 - DNA, 20 bp, Artificial Sequence
  Description of Artificial Sequence: Synthetic oligonucleotide
  Target: ANGPTL4; (+) strand; PAM type: NRG; PAM sequence: AGG
gcctgcaggtacgtgtcccc

SEQ ID NO: 10762 - DNA, 20 bp, Artificial Sequence
  Description of Artificial Sequence: Synthetic oligonucleotide
  Target: ANGPTL4; (+) strand; PAM type: NRG; PAM sequence: GGG
cctgcaggtacgtgtcccca

SEQ ID NO: 10763 - DNA, 20 bp, Artificial Sequence
  Description of Artificial Sequence: Synthetic oligonucleotide
  Target: ANGPTL4; (+) strand; PAM type: NRG; PAM sequence: TGG
caggtacgtgtccccagggc

SEQ ID NO: 10764 - DNA, 20 bp, Artificial Sequence
  Description of Artificial Sequence: Synthetic oligonucleotide
  Target: ANGPTL4; (+) strand; PAM type: NRG; PAM sequence: TAG
gggctggttctccgcgcccc

SEQ ID NO: 10765 - DNA, 20 bp, Artificial Sequence
  Description of Artificial Sequence: Synthetic oligonucleotide
  Target: ANGPTL4; (+) strand; PAM type: NRG; PAM sequence: TGG
ctggttctccgcgcccctag

SEQ ID NO: 10766 - DNA, 20 bp, Artificial Sequence
  Description of Artificial Sequence: Synthetic oligonucleotide
  Target: ANGPTL4; (+) strand; PAM type: NRG; PAM sequence: TGG
cgcgcccctagtggctctcc

SEQ ID NO: 10767 - DNA, 20 bp, Artificial Sequence
  Description of Artificial Sequence: Synthetic oligonucleotide
  Target: ANGPTL4; (+) strand; PAM type: NRG; PAM sequence: TGG
ccctagtggctctcctggct

SEQ ID NO: 10768 - DNA, 20 bp, Artificial Sequence
  Description of Artificial Sequence: Synthetic oligonucleotide
  Target: ANGPTL4; (+) strand; PAM type: NRG; PAM sequence: AAG
tagtggctctcctggcttgg

SEQ ID NO: 10769 - DNA, 20 bp, Artificial Sequence
  Description of Artificial Sequence: Synthetic oligonucleotide
  Target: ANGPTL4; (+) strand; PAM type: NRG; PAM sequence: AGG
agtggctctcctggcttgga

SEQ ID NO: 10770 - DNA, 20 bp, Artificial Sequence
  Description of Artificial Sequence: Synthetic oligonucleotide
  Target: ANGPTL4; (+) strand; PAM type: NRG; PAM sequence: GGG
gtggctctcctggcttggaa

SEQ ID NO: 10771 - DNA, 20 bp, Artificial Sequence
  Description of Artificial Sequence: Synthetic oligonucleotide
  Target: ANGPTL4; (+) strand; PAM type: NRG; PAM sequence: TGG
tctcctggcttggaagggta

SEQ ID NO: 10772 - DNA, 20 bp, Artificial Sequence
  Description of Artificial Sequence: Synthetic oligonucleotide
  Target: ANGPTL4; (+) strand; PAM type: NRG; PAM sequence: CAG
ctggcttggaagggtatgga

SEQ ID NO: 10773 - DNA, 20 bp, Artificial Sequence
  Description of Artificial Sequence: Synthetic oligonucleotide
  Target: ANGPTL4; (+) strand; PAM type: NRG; PAM sequence: AGG
tggcttggaagggtatggac

SEQ ID NO: 10774 - DNA, 20 bp, Artificial Sequence
  Description of Artificial Sequence: Synthetic oligonucleotide
  Target: ANGPTL4; (+) strand; PAM type: NRG; PAM sequence: GAG
gcttggaagggtatggacag

SEQ ID NO: 10775 - DNA, 20 bp, Artificial Sequence
  Description of Artificial Sequence: Synthetic oligonucleotide
  Target: ANGPTL4; (+) strand; PAM type: NRG; PAM sequence: TGG
tggaagggtatggacaggag

SEQ ID NO: 10776 - DNA, 20 bp, Artificial Sequence
  Description of Artificial Sequence: Synthetic oligonucleotide
  Target: ANGPTL4; (+) strand; PAM type: NRG; PAM sequence: GGG
ggaagggtatggacaggagt

SEQ ID NO: 10777 - DNA, 20 bp, Artificial Sequence
  Description of Artificial Sequence: Synthetic oligonucleotide
  Target: ANGPTL4; (+) strand; PAM type: NRG; PAM sequence: GGG
gaagggtatggacaggagtg

SEQ ID NO: 10778 - DNA, 20 bp, Artificial Sequence
  Description of Artificial Sequence: Synthetic oligonucleotide
  Target: ANGPTL4; (+) strand; PAM type: NRG; PAM sequence: TGG
gtatggacaggagtggggcg

SEQ ID NO: 10779 - DNA, 20 bp, Artificial Sequence
  Description of Artificial Sequence: Synthetic oligonucleotide
  Target: ANGPTL4; (+) strand; PAM type: NRG; PAM sequence: GGG
tatggacaggagtggggcgt

SEQ ID NO: 10780 - DNA, 20 bp, Artificial Sequence
  Description of Artificial Sequence: Synthetic oligonucleotide
  Target: ANGPTL4; (+) strand; PAM type: NRG; PAM sequence: GGG
atggacaggagtggggcgtg

SEQ ID NO: 10781 - DNA, 20 bp, Artificial Sequence
  Description of Artificial Sequence: Synthetic oligonucleotide
  Target: ANGPTL4; (+) strand; PAM type: NRG; PAM sequence: GGG
tggacaggagtggggcgtgg

SEQ ID NO: 10782 - DNA, 20 bp, Artificial Sequence
  Description of Artificial Sequence: Synthetic oligonucleotide
  Target: ANGPTL4; (+) strand; PAM type: NRG; PAM sequence: CGG
acaggagtggggcgtggggg

SEQ ID NO: 10783 - DNA, 20 bp, Artificial Sequence
  Description of Artificial Sequence: Synthetic oligonucleotide
  Target: ANGPTL4; (+) strand; PAM type: NRG; PAM sequence: GGG
caggagtggggcgtgggggc

SEQ ID NO: 10784 - DNA, 20 bp, Artificial Sequence
  Description of Artificial Sequence: Synthetic oligonucleotide
  Target: ANGPTL4; (+) strand; PAM type: NRG; PAM sequence: GGG
aggagtggggcgtgggggcg

SEQ ID NO: 10785 - DNA, 20 bp, Artificial Sequence
  Description of Artificial Sequence: Synthetic oligonucleotide
  Target: ANGPTL4; (+) strand; PAM type: NRG; PAM sequence: TGG
gggggcggggtgcgcaactg

SEQ ID NO: 10786 - DNA, 20 bp, Artificial Sequence
  Description of Artificial Sequence: Synthetic oligonucleotide
  Target: ANGPTL4; (+) strand; PAM type: NRG; PAM sequence: TGG
ggtgcgcaactgtggctccc

SEQ ID NO: 10787 - DNA, 20 bp, Artificial Sequence
  Description of Artificial Sequence: Synthetic oligonucleotide
  Target: ANGPTL4; (+) strand; PAM type: NRG; PAM sequence: GGG
gtgcgcaactgtggctccct

SEQ ID NO: 10788 - DNA, 20 bp, Artificial Sequence
  Description of Artificial Sequence: Synthetic oligonucleotide
  Target: ANGPTL4; (+) strand; PAM type: NRG; PAM sequence: AAG
tccctgggcttccctgcgtc

SEQ ID NO: 10789 - DNA, 20 bp, Artificial Sequence
  Description of Artificial Sequence: Synthetic oligonucleotide
  Target: ANGPTL4; (+) strand; PAM type: NRG; PAM sequence: AGG
ccctgggcttccctgcgtca

SEQ ID NO: 10790 - DNA, 20 bp, Artificial Sequence
  Description of Artificial Sequence: Synthetic oligonucleotide
  Target: ANGPTL4; (+) strand; PAM type: NRG; PAM sequence: GGG
cctgggcttccctgcgtcaa

SEQ ID NO: 10791 - DNA, 20 bp, Artificial Sequence
  Description of Artificial Sequence: Synthetic oligonucleotide
  Target: ANGPTL4; (+) strand; PAM type: NRG; PAM sequence: TGG
ggcttccctgcgtcaaggga

SEQ ID NO: 10792 - DNA, 20 bp, Artificial Sequence
  Description of Artificial Sequence: Synthetic oligonucleotide
  Target: ANGPTL4; (+) strand; PAM type: NRG; PAM sequence: GGG
gcttccctgcgtcaagggat

SEQ ID NO: 10793 - DNA, 20 bp, Artificial Sequence
  Description of Artificial Sequence: Synthetic oligonucleotide
  Target: ANGPTL4; (+) strand; PAM type: NRG; PAM sequence: TAG
caagggatgggctcccccct

SEQ ID NO: 10794 - DNA, 20 bp, Artificial Sequence
  Description of Artificial Sequence: Synthetic oligonucleotide
  Target: ANGPTL4; (+) strand; PAM type: NRG; PAM sequence: AGG
aagggatgggctcccccctt

SEQ ID NO: 10795 - DNA, 20 bp, Artificial Sequence
  Description of Artificial Sequence: Synthetic oligonucleotide
  Target: ANGPTL4; (+) strand; PAM type: NRG; PAM sequence: AAG
ggatgggctccccccttagg

SEQ ID NO: 10796 - DNA, 20 bp, Artificial Sequence
  Description of Artificial Sequence: Synthetic oligonucleotide
  Target: ANGPTL4; (+) strand; PAM type: NRG; PAM sequence: GAG
ggctccccccttaggaagcc

SEQ ID NO: 10797 - DNA, 20 bp, Artificial Sequence
  Description of Artificial Sequence: Synthetic oligonucleotide
  Target: ANGPTL4; (+) strand; PAM type: NRG; PAM sequence: AGG
gctccccccttaggaagccg

SEQ ID NO: 10798 - DNA, 20 bp, Artificial Sequence
  Description of Artificial Sequence: Synthetic oligonucleotide
  Target: ANGPTL4; (+) strand; PAM type: NRG; PAM sequence: GAG
tccccccttaggaagccgag

SEQ ID NO: 10799 - DNA, 20 bp, Artificial Sequence
  Description of Artificial Sequence: Synthetic oligonucleotide
  Target: ANGPTL4; (+) strand; PAM type: NRG; PAM sequence: AGG
ccccccttaggaagccgagg

SEQ ID NO: 10800 - DNA, 20 bp, Artificial Sequence
  Description of Artificial Sequence: Synthetic oligonucleotide
  Target: ANGPTL4; (+) strand; PAM type: NRG; PAM sequence: GGG
cccccttaggaagccgagga

SEQ ID NO: 10801 - DNA, 20 bp, Artificial Sequence
  Description of Artificial Sequence: Synthetic oligonucleotide
  Target: ANGPTL4; (+) strand; PAM type: NRG; PAM sequence: GAG
cccttaggaagccgaggagg

SEQ ID NO: 10802 - DNA, 20 bp, Artificial Sequence
  Description of Artificial Sequence: Synthetic oligonucleotide
  Target: ANGPTL4; (+) strand; PAM type: NRG; PAM sequence: AGG
ccttaggaagccgaggaggg

SEQ ID NO: 10803 - DNA, 20 bp, Artificial Sequence
  Description of Artificial Sequence: Synthetic oligonucleotide
  Target: ANGPTL4; (+) strand; PAM type: NRG; PAM sequence: AAG
ccgaggagggaggttcgctc

SEQ ID NO: 10804 - DNA, 20 bp, Artificial Sequence
  Description of Artificial Sequence: Synthetic oligonucleotide
  Target: ANGPTL4; (+) strand; PAM type: NRG; PAM sequence: AGG
cgaggagggaggttcgctca

SEQ ID NO: 10805 - DNA, 20 bp, Artificial Sequence
  Description of Artificial Sequence: Synthetic oligonucleotide
  Target: ANGPTL4; (+) strand; PAM type: NRG; PAM sequence: CAG
gagggaggttcgctcaaggc

SEQ ID NO: 10806 - DNA, 20 bp, Artificial Sequence
  Description of Artificial Sequence: Synthetic oligonucleotide
  Target: ANGPTL4; (+) strand; PAM type: NRG; PAM sequence: AGG
agggaggttcgctcaaggcc

SEQ ID NO: 10807 - DNA, 20 bp, Artificial Sequence
  Description of Artificial Sequence: Synthetic oligonucleotide
  Target: ANGPTL4; (+) strand; PAM type: NRG; PAM sequence: AAG
tcgctcaaggccaggaattc

SEQ ID NO: 10808 - DNA, 20 bp, Artificial Sequence
  Description of Artificial Sequence: Synthetic oligonucleotide
  Target: ANGPTL4; (+) strand; PAM type: NRG; PAM sequence: AAG
caggaattcaagaccaccta

SEQ ID NO: 10809 - DNA, 20 bp, Artificial Sequence
  Description of Artificial Sequence: Synthetic oligonucleotide
  Target: ANGPTL4; (+) strand; PAM type: NRG; PAM sequence: TAG
caagaccacctaaagcaaaa

SEQ ID NO: 10810 - DNA, 20 bp, Artificial Sequence
  Description of Artificial Sequence: Synthetic oligonucleotide
  Target: ANGPTL4; (+) strand; PAM type: NRG; PAM sequence: GAG
accacctaaagcaaaatagc

SEQ ID NO: 10811 - DNA, 20 bp, Artificial Sequence
  Description of Artificial Sequence: Synthetic oligonucleotide
  Target: ANGPTL4; (+) strand; PAM type: NRG; PAM sequence: CGG
atataaaattaaaaaacgac

SEQ ID NO: 10812 - DNA, 20 bp, Artificial Sequence
  Description of Artificial Sequence: Synthetic oligonucleotide
  Target: ANGPTL4; (+) strand; PAM type: NRG; PAM sequence: GGG
tataaaattaaaaaacgacc

SEQ ID NO: 10813 - DNA, 20 bp, Artificial Sequence
  Description of Artificial Sequence: Synthetic oligonucleotide
  Target: ANGPTL4; (+) strand; PAM type: NRG; PAM sequence: CAG
aattaaaaaacgaccgggcg

SEQ ID NO: 10814 - DNA, 20 bp, Artificial Sequence
  Description of Artificial Sequence: Synthetic oligonucleotide
  Target: ANGPTL4; (+) strand; PAM type: NRG; PAM sequence: TGG
taaaaaacgaccgggcgcag

SEQ ID NO: 10815 - DNA, 20 bp, Artificial Sequence
  Description of Artificial Sequence: Synthetic oligonucleotide
  Target: ANGPTL4; (+) strand; PAM type: NRG; PAM sequence: CGG
cgaccgggcgcagtggctca

SEQ ID NO: 10816 - DNA, 20 bp, Artificial Sequence
  Description of Artificial Sequence: Synthetic oligonucleotide
  Target: ANGPTL4; (+) strand; PAM type: NRG; PAM sequence: GAG
accgggcgcagtggctcacg

SEQ ID NO: 10817 - DNA, 20 bp, Artificial Sequence
  Description of Artificial Sequence: Synthetic oligonucleotide
  Target: ANGPTL4; (+) strand; PAM type: NRG; PAM sequence: GAG
cggagcctccacctgctgtc

SEQ ID NO: 10818 - DNA, 20 bp, Artificial Sequence
  Description of Artificial Sequence: Synthetic oligonucleotide
  Target: ANGPTL4; (+) strand; PAM type: NRG; PAM sequence: TAG
cctccacctgctgtcgagac

SEQ ID NO: 10819 - DNA, 20 bp, Artificial Sequence
  Description of Artificial Sequence: Synthetic oligonucleotide
  Target: ANGPTL4; (+) strand; PAM type: NRG; PAM sequence: TGG
acctgctgtcgagactagcc

SEQ ID NO: 10820 - DNA, 20 bp, Artificial Sequence
  Description of Artificial Sequence: Synthetic oligonucleotide
  Target: ANGPTL4; (+) strand; PAM type: NRG; PAM sequence: TGG
cgagactagcctggccaaca

SEQ ID NO: 10821 - DNA, 20 bp, Artificial Sequence
  Description of Artificial Sequence: Synthetic oligonucleotide
  Target: ANGPTL4; (+) strand; PAM type: NRG; PAM sequence: GAG
agactagcctggccaacatg

SEQ ID NO: 10822 - DNA, 20 bp, Artificial Sequence
  Description of Artificial Sequence: Synthetic oligonucleotide
  Target: ANGPTL4; (+) strand; PAM type: NRG; PAM sequence: TAG
ctactaaaaatacaaaaaat

SEQ ID NO: 10823 - DNA, 20 bp, Artificial Sequence
  Description of Artificial Sequence: Synthetic oligonucleotide
  Target: ANGPTL4; (+) strand; PAM type: NRG; PAM sequence: TGG
aaaaatacaaaaaattagcc

SEQ ID NO: 10824 - DNA, 20 bp, Artificial Sequence
  Description of Artificial Sequence: Synthetic oligonucleotide
  Target: ANGPTL4; (+) strand; PAM type: NRG; PAM sequence: TGG
tacaaaaaattagcctggca

SEQ ID NO: 10825 - DNA, 20 bp, Artificial Sequence
  Description of Artificial Sequence: Synthetic oligonucleotide
  Target: ANGPTL4; (+) strand; PAM type: NRG; PAM sequence: CAG
ggtgtgcatgcctgtaatcc

SEQ ID NO: 10826 - DNA, 20 bp, Artificial Sequence
  Description of Artificial Sequence: Synthetic oligonucleotide
  Target: ANGPTL4; (+) strand; PAM type: NRG; PAM sequence: TGG
tgcctgtaatcccagctact

SEQ ID NO: 10827 - DNA, 20 bp, Artificial Sequence
  Description of Artificial Sequence: Synthetic oligonucleotide
  Target: ANGPTL4; (+) strand; PAM type: NRG; PAM sequence: GGG
gcctgtaatcccagctactt

SEQ ID NO: 10828 - DNA, 20 bp, Artificial Sequence
  Description of Artificial Sequence: Synthetic oligonucleotide
  Target: ANGPTL4; (+) strand; PAM type: NRG; PAM sequence: GAG
ctgtaatcccagctacttgg

SEQ ID NO: 10829 - DNA, 20 bp, Artificial Sequence
  Description of Artificial Sequence: Synthetic oligonucleotide
  Target: ANGPTL4; (+) strand; PAM type: NRG; PAM sequence: AGG
tgtaatcccagctacttggg

SEQ ID NO: 10830 - DNA, 20 bp, Artificial Sequence
  Description of Artificial Sequence: Synthetic oligonucleotide
  Target: ANGPTL4; (+) strand; PAM type: NRG; PAM sequence: GAG
tcccagctacttgggaggct

SEQ ID NO: 10831 - DNA, 20 bp, Artificial Sequence
  Description of Artificial Sequence: Synthetic oligonucleotide
  Target: ANGPTL4; (+) strand; PAM type: NRG; PAM sequence: AGG
cccagctacttgggaggctg

SEQ ID NO: 10832 - DNA, 20 bp, Artificial Sequence
  Description of Artificial Sequence: Synthetic oligonucleotide
  Target: ANGPTL4; (+) strand; PAM type: NRG; PAM sequence: CAG
agctacttgggaggctgagg

SEQ ID NO: 10833 - DNA, 20 bp, Artificial Sequence
  Description of Artificial Sequence: Synthetic oligonucleotide
  Target: ANGPTL4; (+) strand; PAM type: NRG; PAM sequence: AGG
gctacttgggaggctgaggc

SEQ ID NO: 10834 - DNA, 20 bp, Artificial Sequence
  Description of Artificial Sequence: Synthetic oligonucleotide
  Target: ANGPTL4; (+) strand; PAM type: NRG; PAM sequence: GAG
tacttgggaggctgaggcag

SEQ ID NO: 10835 - DNA, 20 bp, Artificial Sequence
  Description of Artificial Sequence: Synthetic oligonucleotide
  Target: ANGPTL4; (+) strand; PAM type: NRG; PAM sequence: CGG
gcaggagaatctcttgaacc

SEQ ID NO: 10836 - DNA, 20 bp, Artificial Sequence
  Description of Artificial Sequence: Synthetic oligonucleotide
  Target: ANGPTL4; (+) strand; PAM type: NRG; PAM sequence: GGG
caggagaatctcttgaaccc

SEQ ID NO: 10837 - DNA, 20 bp, Artificial Sequence
  Description of Artificial Sequence: Synthetic oligonucleotide
  Target: ANGPTL4; (+) strand; PAM type: NRG; PAM sequence: GAG
ggagaatctcttgaacccgg

SEQ ID NO: 10838 - DNA, 20 bp, Artificial Sequence
  Description of Artificial Sequence: Synthetic oligonucleotide
  Target: ANGPTL4; (+) strand; PAM type: NRG; PAM sequence: AGG
gagaatctcttgaacccggg

SEQ ID NO: 10839 - DNA, 20 bp, Artificial Sequence
  Description of Artificial Sequence: Synthetic oligonucleotide
  Target: ANGPTL4; (+) strand; PAM type: NRG; PAM sequence: CAG
aatctcttgaacccgggagg

SEQ ID NO: 10840 - DNA, 20 bp, Artificial Sequence
  Description of Artificial Sequence: Synthetic oligonucleotide
  Target: ANGPTL4; (+) strand; PAM type: NRG; PAM sequence: GAG
tctcttgaacccgggaggca

SEQ ID NO: 10841 - DNA, 20 bp, Artificial Sequence
  Description of Artificial Sequence: Synthetic oligonucleotide
  Target: ANGPTL4; (+) strand; PAM type: NRG; PAM sequence: AGG
ctcttgaacccgggaggcag

SEQ ID NO: 10842 - DNA, 20 bp, Artificial Sequence
  Description of Artificial Sequence: Synthetic oligonucleotide
  Target: ANGPTL4; (+) strand; PAM type: NRG; PAM sequence: CAG
aacccgggaggcagaggttg

SEQ ID NO: 10843 - DNA, 20 bp, Artificial Sequence
  Description of Artificial Sequence: Synthetic oligonucleotide
  Target: ANGPTL4; (+) strand; PAM type: NRG; PAM sequence: GAG
cgggaggcagaggttgcagt

SEQ ID NO: 10844 - DNA, 20 bp, Artificial Sequence
  Description of Artificial Sequence: Synthetic oligonucleotide
  Target: ANGPTL4; (+) strand; PAM type: NRG; PAM sequence: GAG
ggcagaggttgcagtgagcc

SEQ ID NO: 10845 - DNA, 20 bp, Artificial Sequence
  Description of Artificial Sequence: Synthetic oligonucleotide
  Target: ANGPTL4; (+) strand; PAM type: NRG; PAM sequence: CAG
gttgcagtgagccgagatcg

SEQ ID NO: 10846 - DNA, 20 bp, Artificial Sequence
  Description of Artificial Sequence: Synthetic oligonucleotide
  Target: ANGPTL4; (+) strand; PAM type: NRG; PAM sequence: CAG
gagatcgcagcactgcactc

SEQ ID NO: 10847 - DNA, 20 bp, Artificial Sequence
  Description of Artificial Sequence: Synthetic oligonucleotide
  Target: ANGPTL4; (+) strand; PAM type: NRG; PAM sequence: TGG
cgcagcactgcactccagcc

SEQ ID NO: 10848 - DNA, 20 bp, Artificial Sequence
  Description of Artificial Sequence: Synthetic oligonucleotide
  Target: ANGPTL4; (+) strand; PAM type: NRG; PAM sequence: GGG
gcagcactgcactccagcct

SEQ ID NO: 10849 - DNA, 20 bp, Artificial Sequence
  Description of Artificial Sequence: Synthetic oligonucleotide
  Target: ANGPTL4; (+) strand; PAM type: NRG; PAM sequence: CAG
ctgcactccagcctgggcaa

SEQ ID NO: 10850 - DNA, 20 bp, Artificial Sequence
  Description of Artificial Sequence: Synthetic oligonucleotide
  Target: ANGPTL4; (+) strand; PAM type: NRG; PAM sequence: GAG
gcactccagcctgggcaaca

SEQ ID NO: 10851 - DNA, 20 bp, Artificial Sequence
  Description of Artificial Sequence: Synthetic oligonucleotide
  Target: ANGPTL4; (+) strand; PAM type: NRG; PAM sequence: GAG
tccagcctgggcaacagagt

SEQ ID NO: 10852 - DNA, 20 bp, Artificial Sequence
  Description of Artificial Sequence: Synthetic oligonucleotide
  Target: ANGPTL4; (+) strand; PAM type: NRG; PAM sequence: TAG
gagactcctcaaaaaaataa

SEQ ID NO: 10853 - DNA, 20 bp, Artificial Sequence
  Description of Artificial Sequence: Synthetic oligonucleotide
  Target: ANGPTL4; (+) strand; PAM type: NRG; PAM sequence: AAG
atagcgataaaataaaaata

SEQ ID NO: 10854 - DNA, 20 bp, Artificial Sequence
  Description of Artificial Sequence: Synthetic oligonucleotide
  Target: ANGPTL4; (+) strand; PAM type: NRG; PAM sequence: CAG
cgataaaataaaaataaagc

SEQ ID NO: 10855 - DNA, 20 bp, Artificial Sequence
  Description of Artificial Sequence: Synthetic oligonucleotide
  Target: ANGPTL4; (+) strand; PAM type: NRG; PAM sequence: AGG
gataaaataaaaataaagcc

SEQ ID NO: 10856 - DNA, 20 bp, Artificial Sequence
  Description of Artificial Sequence: Synthetic oligonucleotide
  Target: ANGPTL4; (+) strand; PAM type: NRG; PAM sequence: CGG
aataaaaataaagccaggtg

SEQ ID NO: 10857 - DNA, 20 bp, Artificial Sequence
  Description of Artificial Sequence: Synthetic oligonucleotide
  Target: ANGPTL4; (+) strand; PAM type: NRG; PAM sequence: TAG
ggtgcggtgactcacgcttg

SEQ ID NO: 10858 - DNA, 20 bp, Artificial Sequence
  Description of Artificial Sequence: Synthetic oligonucleotide
  Target: ANGPTL4; (+) strand; PAM type: NRG; PAM sequence: CAG
gtgactcacgcttgtagtcc

SEQ ID NO: 10859 - DNA, 20 bp, Artificial Sequence
  Description of Artificial Sequence: Synthetic oligonucleotide
  Target: ANGPTL4; (+) strand; PAM type: NRG; PAM sequence: TGG
cgcttgtagtcccagcactt

SEQ ID NO: 10860 - DNA, 20 bp, Artificial Sequence
  Description of Artificial Sequence: Synthetic oligonucleotide
  Target: ANGPTL4; (+) strand; PAM type: NRG; PAM sequence: GGG
gcttgtagtcccagcacttt

SEQ ID NO: 10861 - DNA, 20 bp, Artificial Sequence
  Description of Artificial Sequence: Synthetic oligonucleotide
  Target: ANGPTL4; (+) strand; PAM type: NRG; PAM sequence: GAG
ttgtagtcccagcactttgg

SEQ ID NO: 10862 - DNA, 20 bp, Artificial Sequence
  Description of Artificial Sequence: Synthetic oligonucleotide
  Target: ANGPTL4; (+) strand; PAM type: NRG; PAM sequence: AGG
tgtagtcccagcactttggg

SEQ ID NO: 10863 - DNA, 20 bp, Artificial Sequence
  Description of Artificial Sequence: Synthetic oligonucleotide
  Target: ANGPTL4; (+) strand; PAM type: NRG; PAM sequence: GGG
gtagtcccagcactttggga

SEQ ID NO: 10864 - DNA, 20 bp, Artificial Sequence
  Description of Artificial Sequence: Synthetic oligonucleotide
  Target: ANGPTL4; (+) strand; PAM type: NRG; PAM sequence: GAG
tcccagcactttgggagggc

SEQ ID NO: 10865 - DNA, 20 bp, Artificial Sequence
  Description of Artificial Sequence: Synthetic oligonucleotide
  Target: ANGPTL4; (+) strand; PAM type: NRG; PAM sequence: AGG
cccagcactttgggagggcg

SEQ ID NO: 10866 - DNA, 20 bp, Artificial Sequence
  Description of Artificial Sequence: Synthetic oligonucleotide
  Target: ANGPTL4; (+) strand; PAM type: NRG; PAM sequence: CAG
gcactttgggagggcgaggc

SEQ ID NO: 10867 - DNA, 20 bp, Artificial Sequence
  Description of Artificial Sequence: Synthetic oligonucleotide
  Target: ANGPTL4; (+) strand; PAM type: NRG; PAM sequence: TGG
ctttgggagggcgaggccag

SEQ ID NO: 10868 - DNA, 20 bp, Artificial Sequence
  Description of Artificial Sequence: Synthetic oligonucleotide
  Target: ANGPTL4; (+) strand; PAM type: NRG; PAM sequence: GAG
gcgaggccagtggatcacct

SEQ ID NO: 10869 - DNA, 20 bp, Artificial Sequence
  Description of Artificial Sequence: Synthetic oligonucleotide
  Target: ANGPTL4; (+) strand; PAM type: NRG; PAM sequence: AGG
cgaggccagtggatcacctg

SEQ ID NO: 10870 - DNA, 20 bp, Artificial Sequence
  Description of Artificial Sequence: Synthetic oligonucleotide
  Target: ANGPTL4; (+) strand; PAM type: NRG; PAM sequence: CAG
gccagtggatcacctgaggt

SEQ ID NO: 10871 - DNA, 20 bp, Artificial Sequence
  Description of Artificial Sequence: Synthetic oligonucleotide
  Target: ANGPTL4; (+) strand; PAM type: NRG; PAM sequence: AGG
ccagtggatcacctgaggtc

SEQ ID NO: 10872 - DNA, 20 bp, Artificial Sequence
  Description of Artificial Sequence: Synthetic oligonucleotide
  Target: ANGPTL4; (+) strand; PAM type: NRG; PAM sequence: GAG
agtggatcacctgaggtcag

SEQ ID NO: 10873 - DNA, 20 bp, Artificial Sequence
  Description of Artificial Sequence: Synthetic oligonucleotide
  Target: ANGPTL4; (+) strand; PAM type: NRG; PAM sequence: AAG
tcacctgaggtcaggagttc

SEQ ID NO: 10874 - DNA, 20 bp, Artificial Sequence
  Description of Artificial Sequence: Synthetic oligonucleotide
  Target: ANGPTL4; (+) strand; PAM type: NRG; PAM sequence: CAG
tgaggtcaggagttcaagac

SEQ ID NO: 10875 - DNA, 20 bp, Artificial Sequence
  Description of Artificial Sequence: Synthetic oligonucleotide
  Target: ANGPTL4; (+) strand; PAM type: NRG; PAM sequence: CAG
caagaccagcctgaccaaca

SEQ ID NO: 10876 - DNA, 20 bp, Artificial Sequence
  Description of Artificial Sequence: Synthetic oligonucleotide
  Target: ANGPTL4; (+) strand; PAM type: NRG; PAM sequence: TAG
tctactaaaaatacaaaaat

SEQ ID NO: 10877 - DNA, 20 bp, Artificial Sequence
  Description of Artificial Sequence: Synthetic oligonucleotide
  Target: ANGPTL4; (+) strand; PAM type: NRG; PAM sequence: TGG
ctaaaaatacaaaaattagc

SEQ ID NO: 10878 - DNA, 20 bp, Artificial Sequence
  Description of Artificial Sequence: Synthetic oligonucleotide
  Target: ANGPTL4; (+) strand; PAM type: NRG; PAM sequence: GGG
taaaaatacaaaaattagct

SEQ ID NO: 10879 - DNA, 20 bp, Artificial Sequence
  Description of Artificial Sequence: Synthetic oligonucleotide
  Target: ANGPTL4; (+) strand; PAM type: NRG; PAM sequence: TGG
atacaaaaattagctgggtg

SEQ ID NO: 10880 - DNA, 20 bp, Artificial Sequence
  Description of Artificial Sequence: Synthetic oligonucleotide
  Target: ANGPTL4; (+) strand; PAM type: NRG; PAM sequence: TGG
caaaaattagctgggtgtgg

SEQ ID NO: 10881 - DNA, 20 bp, Artificial Sequence
  Description of Artificial Sequence: Synthetic oligonucleotide
  Target: ANGPTL4; (+) strand; PAM type: NRG; PAM sequence: TGG
aaattagctgggtgtggtgg

SEQ ID NO: 10882 - DNA, 20 bp, Artificial Sequence
  Description of Artificial Sequence: Synthetic oligonucleotide
  Target: ANGPTL4; (+) strand; PAM type: NRG; PAM sequence: GGG
aattagctgggtgtggtggt

SEQ ID NO: 10883 - DNA, 20 bp, Artificial Sequence
  Description of Artificial Sequence: Synthetic oligonucleotide
  Target: ANGPTL4; (+) strand; PAM type: NRG; PAM sequence: CAG
gtggtgggcgcctgtaatcc

SEQ ID NO: 10884 - DNA, 20 bp, Artificial Sequence
  Description of Artificial Sequence: Synthetic oligonucleotide
  Target: ANGPTL4; (+) strand; PAM type: NRG; PAM sequence: TGG
gcgcctgtaatcccagctac

SEQ ID NO: 10885 - DNA, 20 bp, Artificial Sequence
  Description of Artificial Sequence: Synthetic oligonucleotide
  Target: ANGPTL4; (+) strand; PAM type: NRG; PAM sequence: GGG
cgcctgtaatcccagctact

SEQ ID NO: 10886 - DNA, 20 bp, Artificial Sequence
  Description of Artificial Sequence: Synthetic oligonucleotide
  Target: ANGPTL4; (+) strand; PAM type: NRG; PAM sequence: GGG
gcctgtaatcccagctactg

SEQ ID NO: 10887 - DNA, 20 bp, Artificial Sequence
  Description of Artificial Sequence: Synthetic oligonucleotide
  Target: ANGPTL4; (+) strand; PAM type: NRG; PAM sequence: GAG
ctgtaatcccagctactggg

SEQ ID NO: 10888 - DNA, 20 bp, Artificial Sequence
  Description of Artificial Sequence: Synthetic oligonucleotide
  Target: ANGPTL4; (+) strand; PAM type: NRG; PAM sequence: AGG
tgtaatcccagctactgggg

SEQ ID NO: 10889 - DNA, 20 bp, Artificial Sequence
  Description of Artificial Sequence: Synthetic oligonucleotide
  Target: ANGPTL4; (+) strand; PAM type: NRG; PAM sequence: GAG
tcccagctactggggaggct

SEQ ID NO: 10890 - DNA, 20 bp, Artificial Sequence
  Description of Artificial Sequence: Synthetic oligonucleotide
  Target: ANGPTL4; (+) strand; PAM type: NRG; PAM sequence: AGG
cccagctactggggaggctg

SEQ ID NO: 10891 - DNA, 20 bp, Artificial Sequence
  Description of Artificial Sequence: Synthetic oligonucleotide
  Target: ANGPTL4; (+) strand; PAM type: NRG; PAM sequence: CAG
agctactggggaggctgagg

SEQ ID NO: 10892 - DNA, 20 bp, Artificial Sequence
  Description of Artificial Sequence: Synthetic oligonucleotide
  Target: ANGPTL4; (+) strand; PAM type: NRG; PAM sequence: AGG
gctactggggaggctgaggc

SEQ ID NO: 10893 - DNA, 20 bp, Artificial Sequence
  Description of Artificial Sequence: Synthetic oligonucleotide
  Target: ANGPTL4; (+) strand; PAM type: NRG; PAM sequence: GAG
tactggggaggctgaggcag

SEQ ID NO: 10894 - DNA, 20 bp, Artificial Sequence
  Description of Artificial Sequence: Synthetic oligonucleotide
  Target: ANGPTL4; (+) strand; PAM type: NRG; PAM sequence: CGG
gcaggagaacctcttgaacc

SEQ ID NO: 10895 - DNA, 20 bp, Artificial Sequence
  Description of Artificial Sequence: Synthetic oligonucleotide
  Target: ANGPTL4; (+) strand; PAM type: NRG; PAM sequence: GGG
caggagaacctcttgaaccc

SEQ ID NO: 10896 - DNA, 20 bp, Artificial Sequence
  Description of Artificial Sequence: Synthetic oligonucleotide
  Target: ANGPTL4; (+) strand; PAM type: NRG; PAM sequence: GAG
ggagaacctcttgaacccgg

SEQ ID NO: 10897 - DNA, 20 bp, Artificial Sequence
  Description of Artificial Sequence: Synthetic oligonucleotide
  Target: ANGPTL4; (+) strand; PAM type: NRG; PAM sequence: AGG
gagaacctcttgaacccggg

SEQ ID NO: 10898 - DNA, 20 bp, Artificial Sequence
  Description of Artificial Sequence: Synthetic oligonucleotide
  Target: ANGPTL4; (+) strand; PAM type: NRG; PAM sequence: CGG
aacctcttgaacccgggagg

SEQ ID NO: 10899 - DNA, 20 bp, Artificial Sequence
  Description of Artificial Sequence: Synthetic oligonucleotide
  Target: ANGPTL4; (+) strand; PAM type: NRG; PAM sequence: GAG
cctcttgaacccgggaggcg

SEQ ID NO: 10900 - DNA, 20 bp, Artificial Sequence
  Description of Artificial Sequence: Synthetic oligonucleotide
  Target: ANGPTL4; (+) strand; PAM type: NRG; PAM sequence: AGG
ctcttgaacccgggaggcgg

SEQ ID NO: 10901 - DNA, 20 bp, Artificial Sequence
  Description of Artificial Sequence: Synthetic oligonucleotide
  Target: ANGPTL4; (+) strand; PAM type: NRG; PAM sequence: CAG
aacccgggaggcggaggttg

SEQ ID NO: 10902 - DNA, 20 bp, Artificial Sequence
  Description of Artificial Sequence: Synthetic oligonucleotide
  Target: ANGPTL4; (+) strand; PAM type: NRG; PAM sequence: GAG
cgggaggcggaggttgcagt

SEQ ID NO: 10903 - DNA, 20 bp, Artificial Sequence
  Description of Artificial Sequence: Synthetic oligonucleotide
  Target: ANGPTL4; (+) strand; PAM type: NRG; PAM sequence: CGG
aggcggaggttgcagtgagc

SEQ ID NO: 10904 - DNA, 20 bp, Artificial Sequence
  Description of Artificial Sequence: Synthetic oligonucleotide
  Target: ANGPTL4; (+) strand; PAM type: NRG; PAM sequence: GGG
ggcggaggttgcagtgagcc

SEQ ID NO: 10905 - DNA, 20 bp, Artificial Sequence
  Description of Artificial Sequence: Synthetic oligonucleotide
  Target: ANGPTL4; (+) strand; PAM type: NRG; PAM sequence: CAG
gggatcatgccattgcactc

SEQ ID NO: 10906 - DNA, 20 bp, Artificial Sequence
  Description of Artificial Sequence: Synthetic oligonucleotide
  Target: ANGPTL4; (+) strand; PAM type: NRG; PAM sequence: TGG
catgccattgcactccagcc

SEQ ID NO: 10907 - DNA, 20 bp, Artificial Sequence
  Description of Artificial Sequence: Synthetic oligonucleotide
  Target: ANGPTL4; (+) strand; PAM type: NRG; PAM sequence: GGG
atgccattgcactccagcct

SEQ ID NO: 10908 - DNA, 20 bp, Artificial Sequence
  Description of Artificial Sequence: Synthetic oligonucleotide
  Target: ANGPTL4; (+) strand; PAM type: NRG; PAM sequence: CAG
ttgcactccagcctgggcga

SEQ ID NO: 10909 - DNA, 20 bp, Artificial Sequence
  Description of Artificial Sequence: Synthetic oligonucleotide
  Target: ANGPTL4; (+) strand; PAM type: NRG; PAM sequence: GAG
gcactccagcctgggcgaca

SEQ ID NO: 10910 - DNA, 20 bp, Artificial Sequence
  Description of Artificial Sequence: Synthetic oligonucleotide
  Target: ANGPTL4; (+) strand; PAM type: NRG; PAM sequence: TAG
taaaatacaaatacaaaaat

SEQ ID NO: 10911 - DNA, 20 bp, Artificial Sequence
  Description of Artificial Sequence: Synthetic oligonucleotide
  Target: ANGPTL4; (+) strand; PAM type: NRG; PAM sequence: CAG
atacaaatacaaaaattagc

SEQ ID NO: 10912 - DNA, 20 bp, Artificial Sequence
  Description of Artificial Sequence: Synthetic oligonucleotide
  Target: ANGPTL4; (+) strand; PAM type: NRG; PAM sequence: AGG
tacaaatacaaaaattagcc

SEQ ID NO: 10913 - DNA, 20 bp, Artificial Sequence
  Description of Artificial Sequence: Synthetic oligonucleotide
  Target: ANGPTL4; (+) strand; PAM type: NRG; PAM sequence: TGG
atacaaaaattagccaggtg

SEQ ID NO: 10914 - DNA, 20 bp, Artificial Sequence
  Description of Artificial Sequence: Synthetic oligonucleotide
  Target: ANGPTL4; (+) strand; PAM type: NRG; PAM sequence: TGG
caaaaattagccaggtgtgg

SEQ ID NO: 10915 - DNA, 20 bp, Artificial Sequence
  Description of Artificial Sequence: Synthetic oligonucleotide
  Target: ANGPTL4; (+) strand; PAM type: NRG; PAM sequence: CAG
aaattagccaggtgtggtgg

SEQ ID NO: 10916 - DNA, 20 bp, Artificial Sequence
  Description of Artificial Sequence: Synthetic oligonucleotide
  Target: ANGPTL4; (+) strand; PAM type: NRG; PAM sequence: TGG
caggtgtggtggcagctact

SEQ ID NO: 10917 - DNA, 20 bp, Artificial Sequence
  Description of Artificial Sequence: Synthetic oligonucleotide
  Target: ANGPTL4; (+) strand; PAM type: NRG; PAM sequence: GGG
aggtgtggtggcagctactt

SEQ ID NO: 10918 - DNA, 20 bp, Artificial Sequence
  Description of Artificial Sequence: Synthetic oligonucleotide
  Target: ANGPTL4; (+) strand; PAM type: NRG; PAM sequence: GAG
gtgtggtggcagctacttgg

SEQ ID NO: 10919 - DNA, 20 bp, Artificial Sequence
  Description of Artificial Sequence: Synthetic oligonucleotide
  Target: ANGPTL4; (+) strand; PAM type: NRG; PAM sequence: AGG
tgtggtggcagctacttggg

SEQ ID NO: 10920 - DNA, 20 bp, Artificial Sequence
  Description of Artificial Sequence: Synthetic oligonucleotide
  Target: ANGPTL4; (+) strand; PAM type: NRG; PAM sequence: GAG
tggcagctacttgggaggct

SEQ ID NO: 10921 - DNA, 20 bp, Artificial Sequence
  Description of Artificial Sequence: Synthetic oligonucleotide
  Target: ANGPTL4; (+) strand; PAM type: NRG; PAM sequence: AAG
tacttgggaggctgagacac

SEQ ID NO: 10922 - DNA, 20 bp, Artificial Sequence
  Description of Artificial Sequence: Synthetic oligonucleotide
  Target: ANGPTL4; (+) strand; PAM type: NRG; PAM sequence: GAG
ctgagacacaagaatcactt

SEQ ID NO: 10923 - DNA, 20 bp, Artificial Sequence
  Description of Artificial Sequence: Synthetic oligonucleotide
  Target: ANGPTL4; (+) strand; PAM type: NRG; PAM sequence: TGG
acacaagaatcacttgagtc

SEQ ID NO: 10924 - DNA, 20 bp, Artificial Sequence
  Description of Artificial Sequence: Synthetic oligonucleotide
  Target: ANGPTL4; (+) strand; PAM type: NRG; PAM sequence: GGG
cacaagaatcacttgagtct

SEQ ID NO: 10925 - DNA, 20 bp, Artificial Sequence
  Description of Artificial Sequence: Synthetic oligonucleotide
  Target: ANGPTL4; (+) strand; PAM type: NRG; PAM sequence: GAG
caagaatcacttgagtctgg

SEQ ID NO: 10926 - DNA, 20 bp, Artificial Sequence
  Description of Artificial Sequence: Synthetic oligonucleotide
  Target: ANGPTL4; (+) strand; PAM type: NRG; PAM sequence: AGG
aagaatcacttgagtctggg

SEQ ID NO: 10927 - DNA, 20 bp, Artificial Sequence
  Description of Artificial Sequence: Synthetic oligonucleotide
  Target: ANGPTL4; (+) strand; PAM type: NRG; PAM sequence: CAG
aatcacttgagtctgggagg

SEQ ID NO: 10928 - DNA, 20 bp, Artificial Sequence
  Description of Artificial Sequence: Synthetic oligonucleotide
  Target: ANGPTL4; (+) strand; PAM type: NRG; PAM sequence: GAG
tcacttgagtctgggaggca

SEQ ID NO: 10929 - DNA, 20 bp, Artificial Sequence
  Description of Artificial Sequence: Synthetic oligonucleotide
  Target: ANGPTL4; (+) strand; PAM type: NRG; PAM sequence: AGG
cacttgagtctgggaggcag

SEQ ID NO: 10930 - DNA, 20 bp, Artificial Sequence
  Description of Artificial Sequence: Synthetic oligonucleotide
  Target: ANGPTL4; (+) strand; PAM type: NRG; PAM sequence: CAG
agtctgggaggcagaggttg

SEQ ID NO: 10931 - DNA, 20 bp, Artificial Sequence
  Description of Artificial Sequence: Synthetic oligonucleotide
  Target: ANGPTL4; (+) strand; PAM type: NRG; PAM sequence: GAG
tgggaggcagaggttgcagt

SEQ ID NO: 10932 - DNA, 20 bp, Artificial Sequence
  Description of Artificial Sequence: Synthetic oligonucleotide
  Target: ANGPTL4; (+) strand; PAM type: NRG; PAM sequence: AAG
ggcagaggttgcagtgagcc

SEQ ID NO: 10933 - DNA, 20 bp, Artificial Sequence
  Description of Artificial Sequence: Synthetic oligonucleotide
  Target: ANGPTL4; (+) strand; PAM type: NRG; PAM sequence: TGG
tgcgccactgcactccaacc

SEQ ID NO: 10934 - DNA, 20 bp, Artificial Sequence
  Description of Artificial Sequence: Synthetic oligonucleotide
  Target: ANGPTL4; (+) strand; PAM type: NRG; PAM sequence: GGG
gcgccactgcactccaacct

SEQ ID NO: 10935 - DNA, 20 bp, Artificial Sequence
  Description of Artificial Sequence: Synthetic oligonucleotide
  Target: ANGPTL4; (+) strand; PAM type: NRG; PAM sequence: CAG
ctgcactccaacctgggtga

SEQ ID NO: 10936 - DNA, 20 bp, Artificial Sequence
  Description of Artificial Sequence: Synthetic oligonucleotide
  Target: ANGPTL4; (+) strand; PAM type: NRG; PAM sequence: GAG
gcactccaacctgggtgaca

SEQ ID NO: 10937 - DNA, 20 bp, Artificial Sequence
  Description of Artificial Sequence: Synthetic oligonucleotide
  Target: ANGPTL4; (+) strand; PAM type: NRG; PAM sequence: GAG
tccaacctgggtgacagagc

SEQ ID NO: 10938 - DNA, 20 bp, Artificial Sequence
  Description of Artificial Sequence: Synthetic oligonucleotide
  Target: ANGPTL4; (+) strand; PAM type: NRG; PAM sequence: AAG
tgtctgaaaaaataaaaaat

SEQ ID NO: 10939 - DNA, 20 bp, Artificial Sequence
  Description of Artificial Sequence: Synthetic oligonucleotide
  Target: ANGPTL4; (+) strand; PAM type: NRG; PAM sequence: CAG
tgaaaaaataaaaaataagc

SEQ ID NO: 10940 - DNA, 20 bp, Artificial Sequence
  Description of Artificial Sequence: Synthetic oligonucleotide
  Target: ANGPTL4; (+) strand; PAM type: NRG; PAM sequence: AGG
gaaaaaataaaaaataagcc

SEQ ID NO: 10941 - DNA, 20 bp, Artificial Sequence
  Description of Artificial Sequence: Synthetic oligonucleotide
  Target: ANGPTL4; (+) strand; PAM type: NRG; PAM sequence: TAG
aataaaaaataagccaggca

SEQ ID NO: 10942 - DNA, 20 bp, Artificial Sequence
  Description of Artificial Sequence: Synthetic oligonucleotide
  Target: ANGPTL4; (+) strand; PAM type: NRG; PAM sequence: GAG
taaaaaataagccaggcata

SEQ ID NO: 10943 - DNA, 20 bp, Artificial Sequence
  Description of Artificial Sequence: Synthetic oligonucleotide
  Target: ANGPTL4; (+) strand; PAM type: NRG; PAM sequence: TAG
ggcatagagctgcatgactg

SEQ ID NO: 10944 - DNA, 20 bp, Artificial Sequence
  Description of Artificial Sequence: Synthetic oligonucleotide
  Target: ANGPTL4; (+) strand; PAM type: NRG; PAM sequence: CAG
gagctgcatgactgtagtcc

SEQ ID NO: 10945 - DNA, 20 bp, Artificial Sequence
  Description of Artificial Sequence: Synthetic oligonucleotide
  Target: ANGPTL4; (+) strand; PAM type: NRG; PAM sequence: CAG
tgactgtagtcccagctaca

SEQ ID NO: 10946 - DNA, 20 bp, Artificial Sequence
  Description of Artificial Sequence: Synthetic oligonucleotide
  Target: ANGPTL4; (+) strand; PAM type: NRG; PAM sequence: AGG
gactgtagtcccagctacac

SEQ ID NO: 10947 - DNA, 20 bp, Artificial Sequence
  Description of Artificial Sequence: Synthetic oligonucleotide
  Target: ANGPTL4; (+) strand; PAM type: NRG; PAM sequence: GAG
ctgtagtcccagctacacag

SEQ ID NO: 10948 - DNA, 20 bp, Artificial Sequence
  Description of Artificial Sequence: Synthetic oligonucleotide
  Target: ANGPTL4; (+) strand; PAM type: NRG; PAM sequence: AGG
tgtagtcccagctacacagg

SEQ ID NO: 10949 - DNA, 20 bp, Artificial Sequence
  Description of Artificial Sequence: Synthetic oligonucleotide
  Target: ANGPTL4; (+) strand; PAM type: NRG; PAM sequence: CAG
gctacacaggaggctgaaaa

SEQ ID NO: 10950 - DNA, 20 bp, Artificial Sequence
  Description of Artificial Sequence: Synthetic oligonucleotide
  Target: ANGPTL4; (+) strand; PAM type: NRG; PAM sequence: AGG
ctacacaggaggctgaaaac

SEQ ID NO: 10951 - DNA, 20 bp, Artificial Sequence
  Description of Artificial Sequence: Synthetic oligonucleotide
  Target: ANGPTL4; (+) strand; PAM type: NRG; PAM sequence: GAG
acacaggaggctgaaaacag

SEQ ID NO: 10952 - DNA, 20 bp, Artificial Sequence
  Description of Artificial Sequence: Synthetic oligonucleotide
  Target: ANGPTL4; (+) strand; PAM type: NRG; PAM sequence: AGG
cacaggaggctgaaaacagg

SEQ ID NO: 10953 - DNA, 20 bp, Artificial Sequence
  Description of Artificial Sequence: Synthetic oligonucleotide
  Target: ANGPTL4; (+) strand; PAM type: NRG; PAM sequence: CAG
acaggaggatcgcctgaccc

SEQ ID NO: 10954 - DNA, 20 bp, Artificial Sequence
  Description of Artificial Sequence: Synthetic oligonucleotide
  Target: ANGPTL4; (+) strand; PAM type: NRG; PAM sequence: AGG
caggaggatcgcctgacccc

SEQ ID NO: 10955 - DNA, 20 bp, Artificial Sequence
  Description of Artificial Sequence: Synthetic oligonucleotide
  Target: ANGPTL4; (+) strand; PAM type: NRG; PAM sequence: GAG
ggaggatcgcctgaccccag

SEQ ID NO: 10956 - DNA, 20 bp, Artificial Sequence
  Description of Artificial Sequence: Synthetic oligonucleotide
  Target: ANGPTL4; (+) strand; PAM type: NRG; PAM sequence: TGG
gatcgcctgaccccaggagt

SEQ ID NO: 10957 - DNA, 20 bp, Artificial Sequence
  Description of Artificial Sequence: Synthetic oligonucleotide
  Target: ANGPTL4; (+) strand; PAM type: NRG; PAM sequence: GAG
tcgcctgaccccaggagttg

SEQ ID NO: 10958 - DNA, 20 bp, Artificial Sequence
  Description of Artificial Sequence: Synthetic oligonucleotide
  Target: ANGPTL4; (+) strand; PAM type: NRG; PAM sequence: AGG
cgcctgaccccaggagttgg

SEQ ID NO: 10959 - DNA, 20 bp, Artificial Sequence
  Description of Artificial Sequence: Synthetic oligonucleotide
  Target: ANGPTL4; (+) strand; PAM type: NRG; PAM sequence: CAG
accccaggagttggaggctg

SEQ ID NO: 10960 - DNA, 20 bp, Artificial Sequence
  Description of Artificial Sequence: Synthetic oligonucleotide
  Target: ANGPTL4; (+) strand; PAM type: NRG; PAM sequence: GAG
caggagttggaggctgcagt

SEQ ID NO: 10961 - DNA, 20 bp, Artificial Sequence
  Description of Artificial Sequence: Synthetic oligonucleotide
  Target: ANGPTL4; (+) strand; PAM type: NRG; PAM sequence: CAG
gaggctgcagtgagctgtga

SEQ ID NO: 10962 - DNA, 20 bp, Artificial Sequence
  Description of Artificial Sequence: Synthetic oligonucleotide
  Target: ANGPTL4; (+) strand; PAM type: NRG; PAM sequence: CAG
gtgacagcaccactgcactc

SEQ ID NO: 10963 - DNA, 20 bp, Artificial Sequence
  Description of Artificial Sequence: Synthetic oligonucleotide
  Target: ANGPTL4; (+) strand; PAM type: NRG; PAM sequence: TGG
agcaccactgcactccagcc

SEQ ID NO: 10964 - DNA, 20 bp, Artificial Sequence
  Description of Artificial Sequence: Synthetic oligonucleotide
  Target: ANGPTL4; (+) strand; PAM type: NRG; PAM sequence: GGG
gcaccactgcactccagcct

SEQ ID NO: 10965 - DNA, 20 bp, Artificial Sequence
  Description of Artificial Sequence: Synthetic oligonucleotide
  Target: ANGPTL4; (+) strand; PAM type: NRG; PAM sequence: GAG
cactgcactccagcctgggc

SEQ ID NO: 10966 - DNA, 20 bp, Artificial Sequence
  Description of Artificial Sequence: Synthetic oligonucleotide
  Target: ANGPTL4; (+) strand; PAM type: NRG; PAM sequence: GAG
ctgcactccagcctgggcga

SEQ ID NO: 10967 - DNA, 20 bp, Artificial Sequence
  Description of Artificial Sequence: Synthetic oligonucleotide
  Target: ANGPTL4; (+) strand; PAM type: NRG; PAM sequence: GAG
tccagcctgggcgagagaac

SEQ ID NO: 10968 - DNA, 20 bp, Artificial Sequence
  Description of Artificial Sequence: Synthetic oligonucleotide
  Target: ANGPTL4; (+) strand; PAM type: NRG; PAM sequence: TGG
agagaacgagaccccgtcat

SEQ ID NO: 10969 - DNA, 20 bp, Artificial Sequence
  Description of Artificial Sequence: Synthetic oligonucleotide
  Target: ANGPTL4; (+) strand; PAM type: NRG; PAM sequence: GGG
gagaacgagaccccgtcatt

SEQ ID NO: 10970 - DNA, 20 bp, Artificial Sequence
  Description of Artificial Sequence: Synthetic oligonucleotide
  Target: ANGPTL4; (+) strand; PAM type: NRG; PAM sequence: AAG
accccgtcattgggaaaaaa

SEQ ID NO: 10971 - DNA, 20 bp, Artificial Sequence
  Description of Artificial Sequence: Synthetic oligonucleotide
  Target: ANGPTL4; (+) strand; PAM type: NRG; PAM sequence: AAG
cattgggaaaaaaaagaaaa

SEQ ID NO: 10972 - DNA, 20 bp, Artificial Sequence
  Description of Artificial Sequence: Synthetic oligonucleotide
  Target: ANGPTL4; (+) strand; PAM type: NRG; PAM sequence: AAG
gggaaaaaaaagaaaaaaga

SEQ ID NO: 10973 - DNA, 20 bp, Artificial Sequence
  Description of Artificial Sequence: Synthetic oligonucleotide
  Target: ANGPTL4; (+) strand; PAM type: NRG; PAM sequence: TGG
aaaagaaagactcccttgcc

SEQ ID NO: 10974 - DNA, 20 bp, Artificial Sequence
  Description of Artificial Sequence: Synthetic oligonucleotide
  Target: ANGPTL4; (+) strand; PAM type: NRG; PAM sequence: CAG
aagactcccttgcctggcct

SEQ ID NO: 10975 - DNA, 20 bp, Artificial Sequence
  Description of Artificial Sequence: Synthetic oligonucleotide
  Target: ANGPTL4; (+) strand; PAM type: NRG; PAM sequence: CGG
actcccttgcctggcctcag

SEQ ID NO: 10976 - DNA, 20 bp, Artificial Sequence
  Description of Artificial Sequence: Synthetic oligonucleotide
  Target: ANGPTL4; (+) strand; PAM type: NRG; PAM sequence: TGG
ccttgcctggcctcagcgga

SEQ ID NO: 10977 - DNA, 20 bp, Artificial Sequence
  Description of Artificial Sequence: Synthetic oligonucleotide
  Target: ANGPTL4; (+) strand; PAM type: NRG; PAM sequence: GAG
ttgcctggcctcagcggatg

SEQ ID NO: 10978 - DNA, 20 bp, Artificial Sequence
  Description of Artificial Sequence: Synthetic oligonucleotide
  Target: ANGPTL4; (+) strand; PAM type: NRG; PAM sequence: TGG
ggcctcagcggatggagatt

SEQ ID NO: 10979 - DNA, 20 bp, Artificial Sequence
  Description of Artificial Sequence: Synthetic oligonucleotide
  Target: ANGPTL4; (+) strand; PAM type: NRG; PAM sequence: AAG
ctcagcggatggagatttgg

SEQ ID NO: 10980 - DNA, 20 bp, Artificial Sequence
  Description of Artificial Sequence: Synthetic oligonucleotide
  Target: ANGPTL4; (+) strand; PAM type: NRG; PAM sequence: AGG
tcagcggatggagatttgga

SEQ ID NO: 10981 - DNA, 20 bp, Artificial Sequence
  Description of Artificial Sequence: Synthetic oligonucleotide
  Target: ANGPTL4; (+) strand; PAM type: NRG; PAM sequence: TGG
cggatggagatttggaagga

SEQ ID NO: 10982 - DNA, 20 bp, Artificial Sequence
  Description of Artificial Sequence: Synthetic oligonucleotide
  Target: ANGPTL4; (+) strand; PAM type: NRG; PAM sequence: GAG
ggagatttggaaggatggat

SEQ ID NO: 10983 - DNA, 20 bp, Artificial Sequence
  Description of Artificial Sequence: Synthetic oligonucleotide
  Target: ANGPTL4; (+) strand; PAM type: NRG; PAM sequence: TGG
gatttggaaggatggatgag

SEQ ID NO: 10984 - DNA, 20 bp, Artificial Sequence
  Description of Artificial Sequence: Synthetic oligonucleotide
  Target: ANGPTL4; (+) strand; PAM type: NRG; PAM sequence: AAG
gatggatgagtggatgaatt

SEQ ID NO: 10985 - DNA, 20 bp, Artificial Sequence
  Description of Artificial Sequence: Synthetic oligonucleotide
  Target: ANGPTL4; (+) strand; PAM type: NRG; PAM sequence: GAG
tggatgagtggatgaattaa

SEQ ID NO: 10986 - DNA, 20 bp, Artificial Sequence
  Description of Artificial Sequence: Synthetic oligonucleotide
  Target: ANGPTL4; (+) strand; PAM type: NRG; PAM sequence: AGG
ggatgagtggatgaattaag

SEQ ID NO: 10987 - DNA, 20 bp, Artificial Sequence
  Description of Artificial Sequence: Synthetic oligonucleotide
  Target: ANGPTL4; (+) strand; PAM type: NRG; PAM sequence: TGG
gagtggatgaattaagaggt

SEQ ID NO: 10988 - DNA, 20 bp, Artificial Sequence
  Description of Artificial Sequence: Synthetic oligonucleotide
  Target: ANGPTL4; (+) strand; PAM type: NRG; PAM sequence: GGG
agtggatgaattaagaggtt

SEQ ID NO: 10989 - DNA, 20 bp, Artificial Sequence
  Description of Artificial Sequence: Synthetic oligonucleotide
  Target: ANGPTL4; (+) strand; PAM type: NRG; PAM sequence: GGG
gtggatgaattaagaggttg

SEQ ID NO: 10990 - DNA, 20 bp, Artificial Sequence
  Description of Artificial Sequence: Synthetic oligonucleotide
  Target: ANGPTL4; (+) strand; PAM type: NRG; PAM sequence: TAG
gatgaattaagaggttgggg

SEQ ID NO: 10991 - DNA, 20 bp, Artificial Sequence
  Description of Artificial Sequence: Synthetic oligonucleotide
  Target: ANGPTL4; (+) strand; PAM type: NRG; PAM sequence: AGG
atgaattaagaggttggggt

SEQ ID NO: 10992 - DNA, 20 bp, Artificial Sequence
  Description of Artificial Sequence: Synthetic oligonucleotide
  Target: ANGPTL4; (+) strand; PAM type: NRG; PAM sequence: AAG
attaagaggttggggtaggc

SEQ ID NO: 10993 - DNA, 20 bp, Artificial Sequence
  Description of Artificial Sequence: Synthetic oligonucleotide
  Target: ANGPTL4; (+) strand; PAM type: NRG; PAM sequence: TGG
agaggttggggtaggcaagc

SEQ ID NO: 10994 - DNA, 20 bp, Artificial Sequence
  Description of Artificial Sequence: Synthetic oligonucleotide
  Target: ANGPTL4; (+) strand; PAM type: NRG; PAM sequence: GGG
gaggttggggtaggcaagct

SEQ ID NO: 10995 - DNA, 20 bp, Artificial Sequence
  Description of Artificial Sequence: Synthetic oligonucleotide
  Target: ANGPTL4; (+) strand; PAM type: NRG; PAM sequence: AAG
aggcaagctgggtcctcacc

SEQ ID NO: 10996 - DNA, 20 bp, Artificial Sequence
  Description of Artificial Sequence: Synthetic oligonucleotide
  Target: ANGPTL4; (+) strand; PAM type: NRG; PAM sequence: AGG
ggcaagctgggtcctcacca

SEQ ID NO: 10997 - DNA, 20 bp, Artificial Sequence
  Description of Artificial Sequence: Synthetic oligonucleotide
  Target: ANGPTL4; (+) strand; PAM type: NRG; PAM sequence: CAG
ccaaggttttcacccctccc

SEQ ID NO: 10998 - DNA, 20 bp, Artificial Sequence
  Description of Artificial Sequence: Synthetic oligonucleotide
  Target: ANGPTL4; (+) strand; PAM type: NRG; PAM sequence: AAG
cccctccccagacacaactc

SEQ ID NO: 10999 - DNA, 20 bp, Artificial Sequence
  Description of Artificial Sequence: Synthetic oligonucleotide
  Target: ANGPTL4; (+) strand; PAM type: NRG; PAM sequence: AGG
ccctccccagacacaactca

SEQ ID NO: 11000 - DNA, 20 bp, Artificial Sequence
  Description of Artificial Sequence: Synthetic oligonucleotide
  Target: ANGPTL4; (+) strand; PAM type: NRG; PAM sequence: CAG
cccagacacaactcaaggct

SEQ ID NO: 11001 - DNA, 20 bp, Artificial Sequence
  Description of Artificial Sequence: Synthetic oligonucleotide
  Target: ANGPTL4; (+) strand; PAM type: NRG; PAM sequence: CAG
acacaactcaaggctcagaa

SEQ ID NO: 11002 - DNA, 20 bp, Artificial Sequence
  Description of Artificial Sequence: Synthetic oligonucleotide
  Target: ANGPTL4; (+) strand; PAM type: NRG; PAM sequence: CAG
caactcaaggctcagaacag

SEQ ID NO: 11003 - DNA, 20 bp, Artificial Sequence
  Description of Artificial Sequence: Synthetic oligonucleotide
  Target: ANGPTL4; (+) strand; PAM type: NRG; PAM sequence: AGG
aactcaaggctcagaacagc

SEQ ID NO: 11004 - DNA, 20 bp, Artificial Sequence
  Description of Artificial Sequence: Synthetic oligonucleotide
  Target: ANGPTL4; (+) strand; PAM type: NRG; PAM sequence: CAG
aggctcagaacagcaggatc

SEQ ID NO: 11005 - DNA, 20 bp, Artificial Sequence
  Description of Artificial Sequence: Synthetic oligonucleotide
  Target: ANGPTL4; (+) strand; PAM type: NRG; PAM sequence: AAG
ggatccagcaactcttccac

SEQ ID NO: 11006 - DNA, 20 bp, Artificial Sequence
  Description of Artificial Sequence: Synthetic oligonucleotide
  Target: ANGPTL4; (+) strand; PAM type: NRG; PAM sequence: AGG
gatccagcaactcttccaca

SEQ ID NO: 11007 - DNA, 20 bp, Artificial Sequence
  Description of Artificial Sequence: Synthetic oligonucleotide
  Target: ANGPTL4; (+) strand; PAM type: NRG; PAM sequence: TGG
ccagcaactcttccacaagg

SEQ ID NO: 11008 - DNA, 20 bp, Artificial Sequence
  Description of Artificial Sequence: Synthetic oligonucleotide
  Target: ANGPTL4; (+) strand; PAM type: NRG; PAM sequence: CAG
aactcttccacaaggtggcc

SEQ ID NO: 11009 - DNA, 20 bp, Artificial Sequence
  Description of Artificial Sequence: Synthetic oligonucleotide
  Target: ANGPTL4; (+) strand; PAM type: NRG; PAM sequence: CAG
tcttccacaaggtggcccag

SEQ ID NO: 11010 - DNA, 20 bp, Artificial Sequence
  Description of Artificial Sequence: Synthetic oligonucleotide
  Target: ANGPTL4; (+) strand; PAM type: NRG; PAM sequence: CAG
tccacaaggtggcccagcag

SEQ ID NO: 11011 - DNA, 20 bp, Artificial Sequence
  Description of Artificial Sequence: Synthetic oligonucleotide
  Target: ANGPTL4; (+) strand; PAM type: NRG; PAM sequence: CGG
acaaggtggcccagcagcag

SEQ ID NO: 11012 - DNA, 20 bp, Artificial Sequence
  Description of Artificial Sequence: Synthetic oligonucleotide
  Target: ANGPTL4; (+) strand; PAM type: NRG; PAM sequence: TGG
ggcccagcagcagcggcacc

SEQ ID NO: 11013 - DNA, 20 bp, Artificial Sequence
  Description of Artificial Sequence: Synthetic oligonucleotide
  Target: ANGPTL4; (+) strand; PAM type: NRG; PAM sequence: GAG
cccagcagcagcggcacctg

SEQ ID NO: 11014 - DNA, 20 bp, Artificial Sequence
  Description of Artificial Sequence: Synthetic oligonucleotide
  Target: ANGPTL4; (+) strand; PAM type: NRG; PAM sequence: AAG
agcagcagcggcacctggag

SEQ ID NO: 11015 - DNA, 20 bp, Artificial Sequence
  Description of Artificial Sequence: Synthetic oligonucleotide
  Target: ANGPTL4; (+) strand; PAM type: NRG; PAM sequence: CAG
agcagcggcacctggagaag

SEQ ID NO: 11016 - DNA, 20 bp, Artificial Sequence
  Description of Artificial Sequence: Synthetic oligonucleotide
  Target: ANGPTL4; (+) strand; PAM type: NRG; PAM sequence: CAG
agaagcagcacctgcgaatt

SEQ ID NO: 11017 - DNA, 20 bp, Artificial Sequence
  Description of Artificial Sequence: Synthetic oligonucleotide
  Target: ANGPTL4; (+) strand; PAM type: NRG; PAM sequence: AAG
ctgcgaattcagcatctgca

SEQ ID NO: 11018 - DNA, 20 bp, Artificial Sequence
  Description of Artificial Sequence: Synthetic oligonucleotide
  Target: ANGPTL4; (+) strand; PAM type: NRG; PAM sequence: CAG
gaattcagcatctgcaaagc

SEQ ID NO: 11019 - DNA, 20 bp, Artificial Sequence
  Description of Artificial Sequence: Synthetic oligonucleotide
  Target: ANGPTL4; (+) strand; PAM type: NRG; PAM sequence: AGG
aattcagcatctgcaaagcc

SEQ ID NO: 11020 - DNA, 20 bp, Artificial Sequence
  Description of Artificial Sequence: Synthetic oligonucleotide
  Target: ANGPTL4; (+) strand; PAM type: NRG; PAM sequence: TAG
tctgcaaagccaggtaaccc

SEQ ID NO: 11021 - DNA, 20 bp, Artificial Sequence
  Description of Artificial Sequence: Synthetic oligonucleotide
  Target: ANGPTL4; (+) strand; PAM type: NRG; PAM sequence: AGG
ctgcaaagccaggtaaccct

SEQ ID NO: 11022 - DNA, 20 bp, Artificial Sequence
  Description of Artificial Sequence: Synthetic oligonucleotide
  Target: ANGPTL4; (+) strand; PAM type: NRG; PAM sequence: AAG
agccaggtaaccctaggatc

SEQ ID NO: 11023 - DNA, 20 bp, Artificial Sequence
  Description of Artificial Sequence: Synthetic oligonucleotide
  Target: ANGPTL4; (+) strand; PAM type: NRG; PAM sequence: AGG
gccaggtaaccctaggatca

SEQ ID NO: 11024 - DNA, 20 bp, Artificial Sequence
  Description of Artificial Sequence: Synthetic oligonucleotide
  Target: ANGPTL4; (+) strand; PAM type: NRG; PAM sequence: GGG
ccaggtaaccctaggatcaa

SEQ ID NO: 11025 - DNA, 20 bp, Artificial Sequence
  Description of Artificial Sequence: Synthetic oligonucleotide
  Target: ANGPTL4; (+) strand; PAM type: NRG; PAM sequence: GAG
aggtaaccctaggatcaagg

SEQ ID NO: 11026 - DNA, 20 bp, Artificial Sequence
  Description of Artificial Sequence: Synthetic oligonucleotide
  Target: ANGPTL4; (+) strand; PAM type: NRG; PAM sequence: AAG
accctaggatcaagggagaa

SEQ ID NO: 11027 - DNA, 20 bp, Artificial Sequence
  Description of Artificial Sequence: Synthetic oligonucleotide
  Target: ANGPTL4; (+) strand; PAM type: NRG; PAM sequence: AGG
ccctaggatcaagggagaaa

SEQ ID NO: 11028 - DNA, 20 bp, Artificial Sequence
  Description of Artificial Sequence: Synthetic oligonucleotide
  Target: ANGPTL4; (+) strand; PAM type: NRG; PAM sequence: TAG
gggagaaaaggtccctctga

SEQ ID NO: 11029 - DNA, 20 bp, Artificial Sequence
  Description of Artificial Sequence: Synthetic oligonucleotide
  Target: ANGPTL4; (+) strand; PAM type: NRG; PAM sequence: TGG
gaaaaggtccctctgatagc

SEQ ID NO: 11030 - DNA, 20 bp, Artificial Sequence
  Description of Artificial Sequence: Synthetic oligonucleotide
  Target: ANGPTL4; (+) strand; PAM type: NRG; PAM sequence: CAG
tccctctgatagctggaccc

SEQ ID NO: 11031 - DNA, 20 bp, Artificial Sequence
  Description of Artificial Sequence: Synthetic oligonucleotide
  Target: ANGPTL4; (+) strand; PAM type: NRG; PAM sequence: AGG
ccctctgatagctggacccc

SEQ ID NO: 11032 - DNA, 20 bp, Artificial Sequence
  Description of Artificial Sequence: Synthetic oligonucleotide
  Target: ANGPTL4; (+) strand; PAM type: NRG; PAM sequence: GAG
tgatagctggaccccaggtt

SEQ ID NO: 11033 - DNA, 20 bp, Artificial Sequence
  Description of Artificial Sequence: Synthetic oligonucleotide
  Target: ANGPTL4; (+) strand; PAM type: NRG; PAM sequence: GAG
atagctggaccccaggttga

SEQ ID NO: 11034 - DNA, 20 bp, Artificial Sequence
  Description of Artificial Sequence: Synthetic oligonucleotide
  Target: ANGPTL4; (+) strand; PAM type: NRG; PAM sequence: AGG
tagctggaccccaggttgag

SEQ ID NO: 11035 - DNA, 20 bp, Artificial Sequence
  Description of Artificial Sequence: Synthetic oligonucleotide
  Target: ANGPTL4; (+) strand; PAM type: NRG; PAM sequence: GGG
agctggaccccaggttgaga

SEQ ID NO: 11036 - DNA, 20 bp, Artificial Sequence
  Description of Artificial Sequence: Synthetic oligonucleotide
  Target: ANGPTL4; (+) strand; PAM type: NRG; PAM sequence: GAG
ctggaccccaggttgagagg

SEQ ID NO: 11037 - DNA, 20 bp, Artificial Sequence
  Description of Artificial Sequence: Synthetic oligonucleotide
  Target: ANGPTL4; (+) strand; PAM type: NRG; PAM sequence: AGG
tggaccccaggttgagaggg

SEQ ID NO: 11038 - DNA, 20 bp, Artificial Sequence
  Description of Artificial Sequence: Synthetic oligonucleotide
  Target: ANGPTL4; (+) strand; PAM type: NRG; PAM sequence: TGG
accccaggttgagagggagg

SEQ ID NO: 11039 - DNA, 20 bp, Artificial Sequence
  Description of Artificial Sequence: Synthetic oligonucleotide
  Target: ANGPTL4; (+) strand; PAM type: NRG; PAM sequence: GAG
caggttgagagggaggtggt

SEQ ID NO: 11040 - DNA, 20 bp, Artificial Sequence
  Description of Artificial Sequence: Synthetic oligonucleotide
  Target: ANGPTL4; (+) strand; PAM type: NRG; PAM sequence: TGG
gagagggaggtggtgagaac

SEQ ID NO: 11041 - DNA, 20 bp, Artificial Sequence
  Description of Artificial Sequence: Synthetic oligonucleotide
  Target: ANGPTL4; (+) strand; PAM type: NRG; PAM sequence: TGG
ggtggtgagaactggacgtg

SEQ ID NO: 11042 - DNA, 20 bp, Artificial Sequence
  Description of Artificial Sequence: Synthetic oligonucleotide
  Target: ANGPTL4; (+) strand; PAM type: NRG; PAM sequence: TGG
gtgagaactggacgtgtggc

SEQ ID NO: 11043 - DNA, 20 bp, Artificial Sequence
  Description of Artificial Sequence: Synthetic oligonucleotide
  Target: ANGPTL4; (+) strand; PAM type: NRG; PAM sequence: GGG
tgagaactggacgtgtggct

SEQ ID NO: 11044 - DNA, 20 bp, Artificial Sequence
  Description of Artificial Sequence: Synthetic oligonucleotide
  Target: ANGPTL4; (+) strand; PAM type: NRG; PAM sequence: GGG
gagaactggacgtgtggctg

SEQ ID NO: 11045 - DNA, 20 bp, Artificial Sequence
  Description of Artificial Sequence: Synthetic oligonucleotide
  Target: ANGPTL4; (+) strand; PAM type: NRG; PAM sequence: TGG
tggacgtgtggctggggacg

SEQ ID NO: 11046 - DNA, 20 bp, Artificial Sequence
  Description of Artificial Sequence: Synthetic oligonucleotide
  Target: ANGPTL4; (+) strand; PAM type: NRG; PAM sequence: GGG
ggacgtgtggctggggacgt

SEQ ID NO: 11047 - DNA, 20 bp, Artificial Sequence
  Description of Artificial Sequence: Synthetic oligonucleotide
  Target: ANGPTL4; (+) strand; PAM type: NRG; PAM sequence: GGG
gacgtgtggctggggacgtg

SEQ ID NO: 11048 - DNA, 20 bp, Artificial Sequence
  Description of Artificial Sequence: Synthetic oligonucleotide
  Target: ANGPTL4; (+) strand; PAM type: NRG; PAM sequence: CAG
tgtggctggggacgtggggc

SEQ ID NO: 11049 - DNA, 20 bp, Artificial Sequence
  Description of Artificial Sequence: Synthetic oligonucleotide
  Target: ANGPTL4; (+) strand; PAM type: NRG; PAM sequence: AGG
gtggctggggacgtggggcc

SEQ ID NO: 11050 - DNA, 20 bp, Artificial Sequence
  Description of Artificial Sequence: Synthetic oligonucleotide
  Target: ANGPTL4; (+) strand; PAM type: NRG; PAM sequence: CAG
gctggggacgtggggccagg

SEQ ID NO: 11051 - DNA, 20 bp, Artificial Sequence
  Description of Artificial Sequence: Synthetic oligonucleotide
  Target: ANGPTL4; (+) strand; PAM type: NRG; PAM sequence: AGG
ctggggacgtggggccaggc

SEQ ID NO: 11052 - DNA, 20 bp, Artificial Sequence
  Description of Artificial Sequence: Synthetic oligonucleotide
  Target: ANGPTL4; (+) strand; PAM type: NRG; PAM sequence: TAG
accctcctcccgtcccatcc

SEQ ID NO: 11053 - DNA, 20 bp, Artificial Sequence
  Description of Artificial Sequence: Synthetic oligonucleotide
  Target: ANGPTL4; (+) strand; PAM type: NRG; PAM sequence: TGG
cctcccgtcccatcctagtt

SEQ ID NO: 11054 - DNA, 20 bp, Artificial Sequence
  Description of Artificial Sequence: Synthetic oligonucleotide
  Target: ANGPTL4; (+) strand; PAM type: NRG; PAM sequence: TGG
cccatcctagtttggcctcc

SEQ ID NO: 11055 - DNA, 20 bp, Artificial Sequence
  Description of Artificial Sequence: Synthetic oligonucleotide
  Target: ANGPTL4; (+) strand; PAM type: NRG; PAM sequence: AAG
agtttggcctcctggaccac

SEQ ID NO: 11056 - DNA, 20 bp, Artificial Sequence
  Description of Artificial Sequence: Synthetic oligonucleotide
  Target: ANGPTL4; (+) strand; PAM type: NRG; PAM sequence: TAG
cctcctggaccacaagcacc

SEQ ID NO: 11057 - DNA, 20 bp, Artificial Sequence
  Description of Artificial Sequence: Synthetic oligonucleotide
  Target: ANGPTL4; (+) strand; PAM type: NRG; PAM sequence: GAG
accacaagcacctagaccat

SEQ ID NO: 11058 - DNA, 20 bp, Artificial Sequence
  Description of Artificial Sequence: Synthetic oligonucleotide
  Target: ANGPTL4; (+) strand; PAM type: NRG; PAM sequence: AGG
ccacaagcacctagaccatg

SEQ ID NO: 11059 - DNA, 20 bp, Artificial Sequence
  Description of Artificial Sequence: Synthetic oligonucleotide
  Target: ANGPTL4; (+) strand; PAM type: NRG; PAM sequence: TGG
caagcacctagaccatgagg

SEQ ID NO: 11060 - DNA, 20 bp, Artificial Sequence
  Description of Artificial Sequence: Synthetic oligonucleotide
  Target: ANGPTL4; (+) strand; PAM type: NRG; PAM sequence: AAG
acctagaccatgaggtggcc

SEQ ID NO: 11061 - DNA, 20 bp, Artificial Sequence
  Description of Artificial Sequence: Synthetic oligonucleotide
  Target: ANGPTL4; (+) strand; PAM type: NRG; PAM sequence: AAG
gaggtggccaagcctgcccg

SEQ ID NO: 11062 - DNA, 20 bp, Artificial Sequence
  Description of Artificial Sequence: Synthetic oligonucleotide
  Target: ANGPTL4; (+) strand; PAM type: NRG; PAM sequence: AAG
tggccaagcctgcccgaaga

SEQ ID NO: 11063 - DNA, 20 bp, Artificial Sequence
  Description of Artificial Sequence: Synthetic oligonucleotide
  Target: ANGPTL4; (+) strand; PAM type: NRG; PAM sequence: GAG
gccaagcctgcccgaagaaa

SEQ ID NO: 11064 - DNA, 20 bp, Artificial Sequence
  Description of Artificial Sequence: Synthetic oligonucleotide
  Target: ANGPTL4; (+) strand; PAM type: NRG; PAM sequence: AGG
ccaagcctgcccgaagaaag

SEQ ID NO: 11065 - DNA, 20 bp, Artificial Sequence
  Description of Artificial Sequence: Synthetic oligonucleotide
  Target: ANGPTL4; (+) strand; PAM type: NRG; PAM sequence: GAG
cccgaagaaagaggctgccc

SEQ ID NO: 11066 - DNA, 20 bp, Artificial Sequence
  Description of Artificial Sequence: Synthetic oligonucleotide
  Target: ANGPTL4; (+) strand; PAM type: NRG; PAM sequence: TGG
aagaaagaggctgcccgaga

SEQ ID NO: 11067 - DNA, 20 bp, Artificial Sequence
  Description of Artificial Sequence: Synthetic oligonucleotide
  Target: ANGPTL4; (+) strand; PAM type: NRG; PAM sequence: CAG
agaggctgcccgagatggcc

SEQ ID NO: 11068 - DNA, 20 bp, Artificial Sequence
  Description of Artificial Sequence: Synthetic oligonucleotide
  Target: ANGPTL4; (+) strand; PAM type: NRG; PAM sequence: CAG
gctgcccgagatggcccagc

SEQ ID NO: 11069 - DNA, 20 bp, Artificial Sequence
  Description of Artificial Sequence: Synthetic oligonucleotide
  Target: ANGPTL4; (+) strand; PAM type: NRG; PAM sequence: CGG
gatggcccagccagttgacc

SEQ ID NO: 11070 - DNA, 20 bp, Artificial Sequence
  Description of Artificial Sequence: Synthetic oligonucleotide
  Target: ANGPTL4; (+) strand; PAM type: NRG; PAM sequence: CAG
gttgacccggctcacaatgt

SEQ ID NO: 11071 - DNA, 20 bp, Artificial Sequence
  Description of Artificial Sequence: Synthetic oligonucleotide
  Target: ANGPTL4; (+) strand; PAM type: NRG; PAM sequence: GAG
atgtcagccgcctgcaccgt

SEQ ID NO: 11072 - DNA, 20 bp, Artificial Sequence
  Description of Artificial Sequence: Synthetic oligonucleotide
  Target: ANGPTL4; (+) strand; PAM type: NRG; PAM sequence: CGG
gtctgcccctcgatgctctc

SEQ ID NO: 11073 - DNA, 20 bp, Artificial Sequence
  Description of Artificial Sequence: Synthetic oligonucleotide
  Target: ANGPTL4; (+) strand; PAM type: NRG; PAM sequence: TGG
tgcccctcgatgctctccgg

SEQ ID NO: 11074 - DNA, 20 bp, Artificial Sequence
  Description of Artificial Sequence: Synthetic oligonucleotide
  Target: ANGPTL4; (+) strand; PAM type: NRG; PAM sequence: TGG
accccgccacttgccattgc

SEQ ID NO: 11075 - DNA, 20 bp, Artificial Sequence
  Description of Artificial Sequence: Synthetic oligonucleotide
  Target: ANGPTL4; (+) strand; PAM type: NRG; PAM sequence: CAG
attgctggtcctctccttgt

SEQ ID NO: 11076 - DNA, 20 bp, Artificial Sequence
  Description of Artificial Sequence: Synthetic oligonucleotide
  Target: ANGPTL4; (+) strand; PAM type: NRG; PAM sequence: AGG
ttgctggtcctctccttgtc

SEQ ID NO: 11077 - DNA, 20 bp, Artificial Sequence
  Description of Artificial Sequence: Synthetic oligonucleotide
  Target: ANGPTL4; (+) strand; PAM type: NRG; PAM sequence: AAG
ctccttgtcaggtccacctt

SEQ ID NO: 11078 - DNA, 20 bp, Artificial Sequence
  Description of Artificial Sequence: Synthetic oligonucleotide
  Target: ANGPTL4; (+) strand; PAM type: NRG; PAM sequence: AGG
tccttgtcaggtccacctta

SEQ ID NO: 11079 - DNA, 20 bp, Artificial Sequence
  Description of Artificial Sequence: Synthetic oligonucleotide
  Target: ANGPTL4; (+) strand; PAM type: NRG; PAM sequence: GAG
cttgtcaggtccaccttaag

SEQ ID NO: 11080 - DNA, 20 bp, Artificial Sequence
  Description of Artificial Sequence: Synthetic oligonucleotide
  Target: ANGPTL4; (+) strand; PAM type: NRG; PAM sequence: AAG
gtcaggtccaccttaaggag

SEQ ID NO: 11081 - DNA, 20 bp, Artificial Sequence
  Description of Artificial Sequence: Synthetic oligonucleotide
  Target: ANGPTL4; (+) strand; PAM type: NRG; PAM sequence: TGG
accttaaggagaagatgtcc

SEQ ID NO: 11082 - DNA, 20 bp, Artificial Sequence
  Description of Artificial Sequence: Synthetic oligonucleotide
  Target: ANGPTL4; (+) strand; PAM type: NRG; PAM sequence: TGG
aaggagaagatgtcctggcc

SEQ ID NO: 11083 - DNA, 20 bp, Artificial Sequence
  Description of Artificial Sequence: Synthetic oligonucleotide
  Target: ANGPTL4; (+) strand; PAM type: NRG; PAM sequence: GAG
ggagaagatgtcctggcctg

SEQ ID NO: 11084 - DNA, 20 bp, Artificial Sequence
  Description of Artificial Sequence: Synthetic oligonucleotide
  Target: ANGPTL4; (+) strand; PAM type: NRG; PAM sequence: GAG
tgtcctggcctggagtccct

SEQ ID NO: 11085 - DNA, 20 bp, Artificial Sequence
  Description of Artificial Sequence: Synthetic oligonucleotide
  Target: ANGPTL4; (+) strand; PAM type: NRG; PAM sequence: AGG
gtcctggcctggagtccctg

SEQ ID NO: 11086 - DNA, 20 bp, Artificial Sequence
  Description of Artificial Sequence: Synthetic oligonucleotide
  Target: ANGPTL4; (+) strand; PAM type: NRG; PAM sequence: GGG
tcctggcctggagtccctga

SEQ ID NO: 11087 - DNA, 20 bp, Artificial Sequence
  Description of Artificial Sequence: Synthetic oligonucleotide
  Target: ANGPTL4; (+) strand; PAM type: NRG; PAM sequence: CAG
tggagtccctgagggctcac

SEQ ID NO: 11088 - DNA, 20 bp, Artificial Sequence
  Description of Artificial Sequence: Synthetic oligonucleotide
  Target: ANGPTL4; (+) strand; PAM type: NRG; PAM sequence: TGG
cctgagggctcaccagtctc

SEQ ID NO: 11089 - DNA, 20 bp, Artificial Sequence
  Description of Artificial Sequence: Synthetic oligonucleotide
  Target: ANGPTL4; (+) strand; PAM type: NRG; PAM sequence: GGG
ctgagggctcaccagtctct

SEQ ID NO: 11090 - DNA, 20 bp, Artificial Sequence
  Description of Artificial Sequence: Synthetic oligonucleotide
  Target: ANGPTL4; (+) strand; PAM type: NRG; PAM sequence: AAG
gctcaccagtctctgggtca

SEQ ID NO: 11091 - DNA, 20 bp, Artificial Sequence
  Description of Artificial Sequence: Synthetic oligonucleotide
  Target: ANGPTL4; (+) strand; PAM type: NRG; PAM sequence: TGG
agtctctgggtcaaagctga

SEQ ID NO: 11092 - DNA, 20 bp, Artificial Sequence
  Description of Artificial Sequence: Synthetic oligonucleotide
  Target: ANGPTL4; (+) strand; PAM type: NRG; PAM sequence: GGG
gtctctgggtcaaagctgat

SEQ ID NO: 11093 - DNA, 20 bp, Artificial Sequence
  Description of Artificial Sequence: Synthetic oligonucleotide
  Target: ANGPTL4; (+) strand; PAM type: NRG; PAM sequence: GAG
ctctgggtcaaagctgatgg

SEQ ID NO: 11094 - DNA, 20 bp, Artificial Sequence
  Description of Artificial Sequence: Synthetic oligonucleotide
  Target: ANGPTL4; (+) strand; PAM type: NRG; PAM sequence: CAG
gatgggagcacctccttcct

SEQ ID NO: 11095 - DNA, 20 bp, Artificial Sequence
  Description of Artificial Sequence: Synthetic oligonucleotide
  Target: ANGPTL4; (+) strand; PAM type: NRG; PAM sequence: TGG
ctccttcctcagccctgacc

SEQ ID NO: 11096 - DNA, 20 bp, Artificial Sequence
  Description of Artificial Sequence: Synthetic oligonucleotide
  Target: ANGPTL4; (+) strand; PAM type: NRG; PAM sequence: CAG
tcctcagccctgacctggcc

SEQ ID NO: 11097 - DNA, 20 bp, Artificial Sequence
  Description of Artificial Sequence: Synthetic oligonucleotide
  Target: ANGPTL4; (+) strand; PAM type: NRG; PAM sequence: CAG
cagccctgacctggcccagc

SEQ ID NO: 11098 - DNA, 20 bp, Artificial Sequence
  Description of Artificial Sequence: Synthetic oligonucleotide
  Target: ANGPTL4; (+) strand; PAM type: NRG; PAM sequence: AGG
agccctgacctggcccagcc

SEQ ID NO: 11099 - DNA, 20 bp, Artificial Sequence
  Description of Artificial Sequence: Synthetic oligonucleotide
  Target: ANGPTL4; (+) strand; PAM type: NRG; PAM sequence: AAG
acccaacccttctcctctgc

SEQ ID NO: 11100 - DNA, 20 bp, Artificial Sequence
  Description of Artificial Sequence: Synthetic oligonucleotide
  Target: ANGPTL4; (+) strand; PAM type: NRG; PAM sequence: CAG
aacccttctcctctgcaagc

SEQ ID NO: 11101 - DNA, 20 bp, Artificial Sequence
  Description of Artificial Sequence: Synthetic oligonucleotide
  Target: ANGPTL4; (+) strand; PAM type: NRG; PAM sequence: TGG
ccttctcctctgcaagccag

SEQ ID NO: 11102 - DNA, 20 bp, Artificial Sequence
  Description of Artificial Sequence: Synthetic oligonucleotide
  Target: ANGPTL4; (+) strand; PAM type: NRG; PAM sequence: GGG
cttctcctctgcaagccagt

SEQ ID NO: 11103 - DNA, 20 bp, Artificial Sequence
  Description of Artificial Sequence: Synthetic oligonucleotide
  Target: ANGPTL4; (+) strand; PAM type: NRG; PAM sequence: AAG
aagccagtgggctgtccctg

SEQ ID NO: 11104 - DNA, 20 bp, Artificial Sequence
  Description of Artificial Sequence: Synthetic oligonucleotide
  Target: ANGPTL4; (+) strand; PAM type: NRG; PAM sequence: TGG
aagccctgctgatcactgat

SEQ ID NO: 11105 - DNA, 20 bp, Artificial Sequence
  Description of Artificial Sequence: Synthetic oligonucleotide
  Target: ANGPTL4; (+) strand; PAM type: NRG; PAM sequence: CAG
ctgctgatcactgattggaa

SEQ ID NO: 11106 - DNA, 20 bp, Artificial Sequence
  Description of Artificial Sequence: Synthetic oligonucleotide
  Target: ANGPTL4; (+) strand; PAM type: NRG; PAM sequence: GAG
gctgatcactgattggaaca

SEQ ID NO: 11107 - DNA, 20 bp, Artificial Sequence
  Description of Artificial Sequence: Synthetic oligonucleotide
  Target: ANGPTL4; (+) strand; PAM type: NRG; PAM sequence: AGG
ctgatcactgattggaacag

SEQ ID NO: 11108 - DNA, 20 bp, Artificial Sequence
  Description of Artificial Sequence: Synthetic oligonucleotide
  Target: ANGPTL4; (+) strand; PAM type: NRG; PAM sequence: TGG
atcactgattggaacagagg

SEQ ID NO: 11109 - DNA, 20 bp, Artificial Sequence
  Description of Artificial Sequence: Synthetic oligonucleotide
  Target: ANGPTL4; (+) strand; PAM type: NRG; PAM sequence: GAG
cactgattggaacagaggtg

SEQ ID NO: 11110 - DNA, 20 bp, Artificial Sequence
  Description of Artificial Sequence: Synthetic oligonucleotide
  Target: ANGPTL4; (+) strand; PAM type: NRG; PAM sequence: AAG
gattggaacagaggtggaga

SEQ ID NO: 11111 - DNA, 20 bp, Artificial Sequence
  Description of Artificial Sequence: Synthetic oligonucleotide
  Target: ANGPTL4; (+) strand; PAM type: NRG; PAM sequence: GAG
ttggaacagaggtggagaaa

SEQ ID NO: 11112 - DNA, 20 bp, Artificial Sequence
  Description of Artificial Sequence: Synthetic oligonucleotide
  Target: ANGPTL4; (+) strand; PAM type: NRG; PAM sequence: AGG
tggaacagaggtggagaaag

SEQ ID NO: 11113 - DNA, 20 bp, Artificial Sequence
  Description of Artificial Sequence: Synthetic oligonucleotide
  Target: ANGPTL4; (+) strand; PAM type: NRG; PAM sequence: GAG
gaggtggagaaagaggtctt

SEQ ID NO: 11114 - DNA, 20 bp, Artificial Sequence
  Description of Artificial Sequence: Synthetic oligonucleotide
  Target: ANGPTL4; (+) strand; PAM type: NRG; PAM sequence: AGG
aggtggagaaagaggtcttg

SEQ ID NO: 11115 - DNA, 20 bp, Artificial Sequence
  Description of Artificial Sequence: Synthetic oligonucleotide
  Target: ANGPTL4; (+) strand; PAM type: NRG; PAM sequence: GGG
ggtggagaaagaggtcttga

SEQ ID NO: 11116 - DNA, 20 bp, Artificial Sequence
  Description of Artificial Sequence: Synthetic oligonucleotide
  Target: ANGPTL4; (+) strand; PAM type: NRG; PAM sequence: GAG
aaagaggtcttgagggactt

SEQ ID NO: 11117 - DNA, 20 bp, Artificial Sequence
  Description of Artificial Sequence: Synthetic oligonucleotide
  Target: ANGPTL4; (+) strand; PAM type: NRG; PAM sequence: CAG
gtcttgagggacttgagctg

SEQ ID NO: 11118 - DNA, 20 bp, Artificial Sequence
  Description of Artificial Sequence: Synthetic oligonucleotide
  Target: ANGPTL4; (+) strand; PAM type: NRG; PAM sequence: AGG
tcttgagggacttgagctgc

SEQ ID NO: 11119 - DNA, 20 bp, Artificial Sequence
  Description of Artificial Sequence: Synthetic oligonucleotide
  Target: ANGPTL4; (+) strand; PAM type: NRG; PAM sequence: GGG
cttgagggacttgagctgca

SEQ ID NO: 11120 - DNA, 20 bp, Artificial Sequence
  Description of Artificial Sequence: Synthetic oligonucleotide
  Target: ANGPTL4; (+) strand; PAM type: NRG; PAM sequence: GGG
ttgagggacttgagctgcag

SEQ ID NO: 11121 - DNA, 20 bp, Artificial Sequence
  Description of Artificial Sequence: Synthetic oligonucleotide
  Target: ANGPTL4; (+) strand; PAM type: NRG; PAM sequence: TGG
gacttgagctgcaggggtgc

SEQ ID NO: 11122 - DNA, 20 bp, Artificial Sequence
  Description of Artificial Sequence: Synthetic oligonucleotide
  Target: ANGPTL4; (+) strand; PAM type: NRG; PAM sequence: GAG
cttgagctgcaggggtgctg

SEQ ID NO: 11123 - DNA, 20 bp, Artificial Sequence
  Description of Artificial Sequence: Synthetic oligonucleotide
  Target: ANGPTL4; (+) strand; PAM type: NRG; PAM sequence: AAG
gagctgcaggggtgctggag

SEQ ID NO: 11124 - DNA, 20 bp, Artificial Sequence
  Description of Artificial Sequence: Synthetic oligonucleotide
  Target: ANGPTL4; (+) strand; PAM type: NRG; PAM sequence: AGG
agctgcaggggtgctggaga

SEQ ID NO: 11125 - DNA, 20 bp, Artificial Sequence
  Description of Artificial Sequence: Synthetic oligonucleotide
  Target: ANGPTL4; (+) strand; PAM type: NRG; PAM sequence: TAG
tgcaggggtgctggagaagg

SEQ ID NO: 11126 - DNA, 20 bp, Artificial Sequence
  Description of Artificial Sequence: Synthetic oligonucleotide
  Target: ANGPTL4; (+) strand; PAM type: NRG; PAM sequence: TGG
ggtgctggagaaggtagaaa

SEQ ID NO: 11127 - DNA, 20 bp, Artificial Sequence
  Description of Artificial Sequence: Synthetic oligonucleotide
  Target: ANGPTL4; (+) strand; PAM type: NRG; PAM sequence: GGG
gtgctggagaaggtagaaat

SEQ ID NO: 11128 - DNA, 20 bp, Artificial Sequence
  Description of Artificial Sequence: Synthetic oligonucleotide
  Target: ANGPTL4; (+) strand; PAM type: NRG; PAM sequence: GGG
tgctggagaaggtagaaatg

SEQ ID NO: 11129 - DNA, 20 bp, Artificial Sequence
  Description of Artificial Sequence: Synthetic oligonucleotide
  Target: ANGPTL4; (+) strand; PAM type: NRG; PAM sequence: CGG
gagaaggtagaaatggggtt

SEQ ID NO: 11130 - DNA, 20 bp, Artificial Sequence
  Description of Artificial Sequence: Synthetic oligonucleotide
  Target: ANGPTL4; (+) strand; PAM type: NRG; PAM sequence: GGG
agaaggtagaaatggggttc

SEQ ID NO: 11131 - DNA, 20 bp, Artificial Sequence
  Description of Artificial Sequence: Synthetic oligonucleotide
  Target: ANGPTL4; (+) strand; PAM type: NRG; PAM sequence: GGG
gaaggtagaaatggggttcg

SEQ ID NO: 11132 - DNA, 20 bp, Artificial Sequence
  Description of Artificial Sequence: Synthetic oligonucleotide
  Target: ANGPTL4; (+) strand; PAM type: NRG; PAM sequence: AAG
gggttcggggtgccatcctg

SEQ ID NO: 11133 - DNA, 20 bp, Artificial Sequence
  Description of Artificial Sequence: Synthetic oligonucleotide
  Target: ANGPTL4; (+) strand; PAM type: NRG; PAM sequence: AGG
ggttcggggtgccatcctga

SEQ ID NO: 11134 - DNA, 20 bp, Artificial Sequence
  Description of Artificial Sequence: Synthetic oligonucleotide
  Target: ANGPTL4; (+) strand; PAM type: NRG; PAM sequence: TAG
cggggtgccatcctgaaggt

SEQ ID NO: 11135 - DNA, 20 bp, Artificial Sequence
  Description of Artificial Sequence: Synthetic oligonucleotide
  Target: ANGPTL4; (+) strand; PAM type: NRG; PAM sequence: TAG
tcctgaaggttagaaccttc

SEQ ID NO: 11136 - DNA, 20 bp, Artificial Sequence
  Description of Artificial Sequence: Synthetic oligonucleotide
  Target: ANGPTL4; (+) strand; PAM type: NRG; PAM sequence: AGG
cctgaaggttagaaccttct

SEQ ID NO: 11137 - DNA, 20 bp, Artificial Sequence
  Description of Artificial Sequence: Synthetic oligonucleotide
  Target: ANGPTL4; (+) strand; PAM type: NRG; PAM sequence: GGG
ctgaaggttagaaccttcta

SEQ ID NO: 11138 - DNA, 20 bp, Artificial Sequence
  Description of Artificial Sequence: Synthetic oligonucleotide
  Target: ANGPTL4; (+) strand; PAM type: NRG; PAM sequence: GGG
tgaaggttagaaccttctag

SEQ ID NO: 11139 - DNA, 20 bp, Artificial Sequence
  Description of Artificial Sequence: Synthetic oligonucleotide
  Target: ANGPTL4; (+) strand; PAM type: NRG; PAM sequence: GAG
aaggttagaaccttctaggg

SEQ ID NO: 11140 - DNA, 20 bp, Artificial Sequence
  Description of Artificial Sequence: Synthetic oligonucleotide
  Target: ANGPTL4; (+) strand; PAM type: NRG; PAM sequence: AGG
aggttagaaccttctagggg

SEQ ID NO: 11141 - DNA, 20 bp, Artificial Sequence
  Description of Artificial Sequence: Synthetic oligonucleotide
  Target: ANGPTL4; (+) strand; PAM type: NRG; PAM sequence: GGG
ggttagaaccttctagggga

SEQ ID NO: 11142 - DNA, 20 bp, Artificial Sequence
  Description of Artificial Sequence: Synthetic oligonucleotide
  Target: ANGPTL4; (+) strand; PAM type: NRG; PAM sequence: TGG
ccttctaggggagggtgtca

SEQ ID NO: 11143 - DNA, 20 bp, Artificial Sequence
  Description of Artificial Sequence: Synthetic oligonucleotide
  Target: ANGPTL4; (+) strand; PAM type: NRG; PAM sequence: GAG
ttctaggggagggtgtcatg

SEQ ID NO: 11144 - DNA, 20 bp, Artificial Sequence
  Description of Artificial Sequence: Synthetic oligonucleotide
  Target: ANGPTL4; (+) strand; PAM type: NRG; PAM sequence: AGG
tctaggggagggtgtcatgg

SEQ ID NO: 11145 - DNA, 20 bp, Artificial Sequence
  Description of Artificial Sequence: Synthetic oligonucleotide
  Target: ANGPTL4; (+) strand; PAM type: NRG; PAM sequence: GAG
taggggagggtgtcatggag

SEQ ID NO: 11146 - DNA, 20 bp, Artificial Sequence
  Description of Artificial Sequence: Synthetic oligonucleotide
  Target: ANGPTL4; (+) strand; PAM type: NRG; PAM sequence: AGG
aggggagggtgtcatggagg

SEQ ID NO: 11147 - DNA, 20 bp, Artificial Sequence
  Description of Artificial Sequence: Synthetic oligonucleotide
  Target: ANGPTL4; (+) strand; PAM type: NRG; PAM sequence: GGG
ggggagggtgtcatggagga

SEQ ID NO: 11148 - DNA, 20 bp, Artificial Sequence
  Description of Artificial Sequence: Synthetic oligonucleotide
  Target: ANGPTL4; (+) strand; PAM type: NRG; PAM sequence: GGG
gggagggtgtcatggaggag

SEQ ID NO: 11149 - DNA, 20 bp, Artificial Sequence
  Description of Artificial Sequence: Synthetic oligonucleotide
  Target: ANGPTL4; (+) strand; PAM type: NRG; PAM sequence: GGG
ggagggtgtcatggaggagg

SEQ ID NO: 11150 - DNA, 20 bp, Artificial Sequence
  Description of Artificial Sequence: Synthetic oligonucleotide
  Target: ANGPTL4; (+) strand; PAM type: NRG; PAM sequence: CAG
tgtcatggaggagggggtgc

SEQ ID NO: 11151 - DNA, 20 bp, Artificial Sequence
  Description of Artificial Sequence: Synthetic oligonucleotide
  Target: ANGPTL4; (+) strand; PAM type: NRG; PAM sequence: AGG
gtcatggaggagggggtgcc

SEQ ID NO: 11152 - DNA, 20 bp, Artificial Sequence
  Description of Artificial Sequence: Synthetic oligonucleotide
  Target: ANGPTL4; (+) strand; PAM type: NRG; PAM sequence: TAG
atggaggagggggtgccagg

SEQ ID NO: 11153 - DNA, 20 bp, Artificial Sequence
  Description of Artificial Sequence: Synthetic oligonucleotide
  Target: ANGPTL4; (+) strand; PAM type: NRG; PAM sequence: TAG
gaggagggggtgccaggtag

SEQ ID NO: 11154 - DNA, 20 bp, Artificial Sequence
  Description of Artificial Sequence: Synthetic oligonucleotide
  Target: ANGPTL4; (+) strand; PAM type: NRG; PAM sequence: TAG
gtgccaggtagtagtgtttg

SEQ ID NO: 11155 - DNA, 20 bp, Artificial Sequence
  Description of Artificial Sequence: Synthetic oligonucleotide
  Target: ANGPTL4; (+) strand; PAM type: NRG; PAM sequence: TGG
ggtagtagtgtttgtagatt

SEQ ID NO: 11156 - DNA, 20 bp, Artificial Sequence
  Description of Artificial Sequence: Synthetic oligonucleotide
  Target: ANGPTL4; (+) strand; PAM type: NRG; PAM sequence: GGG
gtagtagtgtttgtagattt

SEQ ID NO: 11157 - DNA, 20 bp, Artificial Sequence
  Description of Artificial Sequence: Synthetic oligonucleotide
  Target: ANGPTL4; (+) strand; PAM type: NRG; PAM sequence: TGG
ttgggccctccacaatgtct

SEQ ID NO: 11158 - DNA, 20 bp, Artificial Sequence
  Description of Artificial Sequence: Synthetic oligonucleotide
  Target: ANGPTL4; (+) strand; PAM type: NRG; PAM sequence: GGG
tgggccctccacaatgtctt

SEQ ID NO: 11159 - DNA, 20 bp, Artificial Sequence
  Description of Artificial Sequence: Synthetic oligonucleotide
  Target: ANGPTL4; (+) strand; PAM type: NRG; PAM sequence: GGG
gggccctccacaatgtcttg

SEQ ID NO: 11160 - DNA, 20 bp, Artificial Sequence
  Description of Artificial Sequence: Synthetic oligonucleotide
  Target: ANGPTL4; (+) strand; PAM type: NRG; PAM sequence: TGG
ccacaatgtcttggggtatg

SEQ ID NO: 11161 - DNA, 20 bp, Artificial Sequence
  Description of Artificial Sequence: Synthetic oligonucleotide
  Target: ANGPTL4; (+) strand; PAM type: NRG; PAM sequence: GGG
cacaatgtcttggggtatgt

SEQ ID NO: 11162 - DNA, 20 bp, Artificial Sequence
  Description of Artificial Sequence: Synthetic oligonucleotide
  Target: ANGPTL4; (+) strand; PAM type: NRG; PAM sequence: TAG
gtcttggggtatgtgggaat

SEQ ID NO: 11163 - DNA, 20 bp, Artificial Sequence
  Description of Artificial Sequence: Synthetic oligonucleotide
  Target: ANGPTL4; (+) strand; PAM type: NRG; PAM sequence: AGG
tcttggggtatgtgggaatt

SEQ ID NO: 11164 - DNA, 20 bp, Artificial Sequence
  Description of Artificial Sequence: Synthetic oligonucleotide
  Target: ANGPTL4; (+) strand; PAM type: NRG; PAM sequence: GGG
cttggggtatgtgggaatta

SEQ ID NO: 11165 - DNA, 20 bp, Artificial Sequence
  Description of Artificial Sequence: Synthetic oligonucleotide
  Target: ANGPTL4; (+) strand; PAM type: NRG; PAM sequence: TGG
gggtatgtgggaattagggc

SEQ ID NO: 11166 - DNA, 20 bp, Artificial Sequence
  Description of Artificial Sequence: Synthetic oligonucleotide
  Target: ANGPTL4; (+) strand; PAM type: NRG; PAM sequence: GGG
ggtatgtgggaattagggct

SEQ ID NO: 11167 - DNA, 20 bp, Artificial Sequence
  Description of Artificial Sequence: Synthetic oligonucleotide
  Target: ANGPTL4; (+) strand; PAM type: NRG; PAM sequence: CAG
gaattagggctgggaacccc

SEQ ID NO: 11168 - DNA, 20 bp, Artificial Sequence
  Description of Artificial Sequence: Synthetic oligonucleotide
  Target: ANGPTL4; (+) strand; PAM type: NRG; PAM sequence: CAG
ggctgggaacccccagctcc

SEQ ID NO: 11169 - DNA, 20 bp, Artificial Sequence
  Description of Artificial Sequence: Synthetic oligonucleotide
  Target: ANGPTL4; (+) strand; PAM type: NRG; PAM sequence: CAG
ggaacccccagctcccagac

SEQ ID NO: 11170 - DNA, 20 bp, Artificial Sequence
  Description of Artificial Sequence: Synthetic oligonucleotide
  Target: ANGPTL4; (+) strand; PAM type: NRG; PAM sequence: CAG
atcttacaaatccaatgctc

SEQ ID NO: 11171 - DNA, 20 bp, Artificial Sequence
  Description of Artificial Sequence: Synthetic oligonucleotide
  Target: ANGPTL4; (+) strand; PAM type: NRG; PAM sequence: AGG
tcttacaaatccaatgctcc

SEQ ID NO: 11172 - DNA, 20 bp, Artificial Sequence
  Description of Artificial Sequence: Synthetic oligonucleotide
  Target: ANGPTL4; (+) strand; PAM type: NRG; PAM sequence: CGG
tcctccctccccgcccccgc

SEQ ID NO: 11173 - DNA, 20 bp, Artificial Sequence
  Description of Artificial Sequence: Synthetic oligonucleotide
  Target: ANGPTL4; (+) strand; PAM type: NRG; PAM sequence: CAG
cgccggccccctccccaccg

SEQ ID NO: 11174 - DNA, 20 bp, Artificial Sequence
  Description of Artificial Sequence: Synthetic oligonucleotide
  Target: ANGPTL4; (+) strand; PAM type: NRG; PAM sequence: AAG
ggccccctccccaccgcaga

SEQ ID NO: 11175 - DNA, 20 bp, Artificial Sequence
  Description of Artificial Sequence: Synthetic oligonucleotide
  Target: ANGPTL4; (+) strand; PAM type: NRG; PAM sequence: TGG
cccctccccaccgcagaaag

SEQ ID NO: 11176 - DNA, 20 bp, Artificial Sequence
  Description of Artificial Sequence: Synthetic oligonucleotide
  Target: ANGPTL4; (+) strand; PAM type: NRG; PAM sequence: GGG
ccctccccaccgcagaaagt

SEQ ID NO: 11177 - DNA, 20 bp, Artificial Sequence
  Description of Artificial Sequence: Synthetic oligonucleotide
  Target: ANGPTL4; (+) strand; PAM type: NRG; PAM sequence: AAG
tgggcttttgctgccaccac

SEQ ID NO: 11178 - DNA, 20 bp, Artificial Sequence
  Description of Artificial Sequence: Synthetic oligonucleotide
  Target: ANGPTL4; (+) strand; PAM type: NRG; PAM sequence: TAG
tttgctgccaccacaagttg

SEQ ID NO: 11179 - DNA, 20 bp, Artificial Sequence
  Description of Artificial Sequence: Synthetic oligonucleotide
  Target: ANGPTL4; (+) strand; PAM type: NRG; PAM sequence: AGG
ttgctgccaccacaagttgt

SEQ ID NO: 11180 - DNA, 20 bp, Artificial Sequence
  Description of Artificial Sequence: Synthetic oligonucleotide
  Target: ANGPTL4; (+) strand; PAM type: NRG; PAM sequence: CAG
tctccgttcatctcgaacca

SEQ ID NO: 11181 - DNA, 20 bp, Artificial Sequence
  Description of Artificial Sequence: Synthetic oligonucleotide
  Target: ANGPTL4; (+) strand; PAM type: NRG; PAM sequence: CAG
atgtccacgtgtgtccgatg

SEQ ID NO: 11182 - DNA, 20 bp, Artificial Sequence
  Description of Artificial Sequence: Synthetic oligonucleotide
  Target: ANGPTL4; (+) strand; PAM type: NRG; PAM sequence: CGG
gtgtgtccgatgcagactcg

SEQ ID NO: 11183 - DNA, 20 bp, Artificial Sequence
  Description of Artificial Sequence: Synthetic oligonucleotide
  Target: ANGPTL4; (+) strand; PAM type: NRG; PAM sequence: AAG
atgcagactcgcggttctct

SEQ ID NO: 11184 - DNA, 20 bp, Artificial Sequence
  Description of Artificial Sequence: Synthetic oligonucleotide
  Target: ANGPTL4; (+) strand; PAM type: NRG; PAM sequence: CGG
ctcgcggttctctaagttca

SEQ ID NO: 11185 - DNA, 20 bp, Artificial Sequence
  Description of Artificial Sequence: Synthetic oligonucleotide
  Target: ANGPTL4; (+) strand; PAM type: NRG; PAM sequence: CGG
tctaagttcacggccccaca

SEQ ID NO: 11186 - DNA, 20 bp, Artificial Sequence
  Description of Artificial Sequence: Synthetic oligonucleotide
  Target: ANGPTL4; (+) strand; PAM type: NRG; PAM sequence: TGG
ggccccacacggtttctctg

SEQ ID NO: 11187 - DNA, 20 bp, Artificial Sequence
  Description of Artificial Sequence: Synthetic oligonucleotide
  Target: ANGPTL4; (+) strand; PAM type: NRG; PAM sequence: TGG
ctcatccttccctgcatctg

SEQ ID NO: 11188 - DNA, 20 bp, Artificial Sequence
  Description of Artificial Sequence: Synthetic oligonucleotide
  Target: ANGPTL4; (+) strand; PAM type: NRG; PAM sequence: CAG
cctgcatctgtggctgtcca

SEQ ID NO: 11189 - DNA, 20 bp, Artificial Sequence
  Description of Artificial Sequence: Synthetic oligonucleotide
  Target: ANGPTL4; (+) strand; PAM type: NRG; PAM sequence: TGG
tgtggctgtccacagccaac

SEQ ID NO: 11190 - DNA, 20 bp, Artificial Sequence
  Description of Artificial Sequence: Synthetic oligonucleotide
  Target: ANGPTL4; (+) strand; PAM type: NRG; PAM sequence: GGG
gtggctgtccacagccaact

SEQ ID NO: 11191 - DNA, 20 bp, Artificial Sequence
  Description of Artificial Sequence: Synthetic oligonucleotide
  Target: ANGPTL4; (+) strand; PAM type: NRG; PAM sequence: AAG
gtccacagccaactgggtga

SEQ ID NO: 11192 - DNA, 20 bp, Artificial Sequence
  Description of Artificial Sequence: Synthetic oligonucleotide
  Target: ANGPTL4; (+) strand; PAM type: NRG; PAM sequence: TGG
cagccaactgggtgaaagtt

SEQ ID NO: 11193 - DNA, 20 bp, Artificial Sequence
  Description of Artificial Sequence: Synthetic oligonucleotide
  Target: ANGPTL4; (+) strand; PAM type: NRG; PAM sequence: TAG
tggatccccctctcacaccc

SEQ ID NO: 11194 - DNA, 20 bp, Artificial Sequence
  Description of Artificial Sequence: Synthetic oligonucleotide
  Target: ANGPTL4; (+) strand; PAM type: NRG; PAM sequence: AGG
ggatccccctctcacaccct

SEQ ID NO: 11195 - DNA, 20 bp, Artificial Sequence
  Description of Artificial Sequence: Synthetic oligonucleotide
  Target: ANGPTL4; (+) strand; PAM type: NRG; PAM sequence: GGG
gatccccctctcacacccta

SEQ ID NO: 11196 - DNA, 20 bp, Artificial Sequence
  Description of Artificial Sequence: Synthetic oligonucleotide
  Target: ANGPTL4; (+) strand; PAM type: NRG; PAM sequence: CAG
cccctctcacaccctagggt

SEQ ID NO: 11197 - DNA, 20 bp, Artificial Sequence
  Description of Artificial Sequence: Synthetic oligonucleotide
  Target: ANGPTL4; (+) strand; PAM type: NRG; PAM sequence: TGG
ctctcacaccctagggtcag

SEQ ID NO: 11198 - DNA, 20 bp, Artificial Sequence
  Description of Artificial Sequence: Synthetic oligonucleotide
  Target: ANGPTL4; (+) strand; PAM type: NRG; PAM sequence: CAG
tcacaccctagggtcagtgg

SEQ ID NO: 11199 - DNA, 20 bp, Artificial Sequence
  Description of Artificial Sequence: Synthetic oligonucleotide
  Target: ANGPTL4; (+) strand; PAM type: NRG; PAM sequence: AGG
cacaccctagggtcagtggc

SEQ ID NO: 11200 - DNA, 20 bp, Artificial Sequence
  Description of Artificial Sequence: Synthetic oligonucleotide
  Target: ANGPTL4; (+) strand; PAM type: NRG; PAM sequence: CAG
tagggtcagtggcaggcttc

SEQ ID NO: 11201 - DNA, 20 bp, Artificial Sequence
  Description of Artificial Sequence: Synthetic oligonucleotide
  Target: ANGPTL4; (+) strand; PAM type: NRG; PAM sequence: TAG
gtggcaggcttccagcactg

SEQ ID NO: 11202 - DNA, 20 bp, Artificial Sequence
  Description of Artificial Sequence: Synthetic oligonucleotide
  Target: ANGPTL4; (+) strand; PAM type: NRG; PAM sequence: GAG
gcttccagcactgtagacct

SEQ ID NO: 11203 - DNA, 20 bp, Artificial Sequence
  Description of Artificial Sequence: Synthetic oligonucleotide
  Target: ANGPTL4; (+) strand; PAM type: NRG; PAM sequence: AGG
cttccagcactgtagacctg

SEQ ID NO: 11204 - DNA, 20 bp, Artificial Sequence
  Description of Artificial Sequence: Synthetic oligonucleotide
  Target: ANGPTL4; (+) strand; PAM type: NRG; PAM sequence: GGG
ttccagcactgtagacctga

SEQ ID NO: 11205 - DNA, 20 bp, Artificial Sequence
  Description of Artificial Sequence: Synthetic oligonucleotide
  Target: ANGPTL4; (+) strand; PAM type: NRG; PAM sequence: AAG
ctgagggttctctcctcccc

SEQ ID NO: 11206 - DNA, 20 bp, Artificial Sequence
  Description of Artificial Sequence: Synthetic oligonucleotide
  Target: ANGPTL4; (+) strand; PAM type: NRG; PAM sequence: CAG
ctgcccgcccccaaccccgc

SEQ ID NO: 11207 - DNA, 20 bp, Artificial Sequence
  Description of Artificial Sequence: Synthetic oligonucleotide
  Target: ANGPTL4; (+) strand; PAM type: NRG; PAM sequence: AGG
tgcccgcccccaaccccgcc

SEQ ID NO: 11208 - DNA, 20 bp, Artificial Sequence
  Description of Artificial Sequence: Synthetic oligonucleotide
  Target: ANGPTL4; (+) strand; PAM type: NRG; PAM sequence: TAG
cgcccccaaccccgccaggc

SEQ ID NO: 11209 - DNA, 20 bp, Artificial Sequence
  Description of Artificial Sequence: Synthetic oligonucleotide
  Target: ANGPTL4; (+) strand; PAM type: NRG; PAM sequence: CAG
accccgccaggctagcatct

SEQ ID NO: 11210 - DNA, 20 bp, Artificial Sequence
  Description of Artificial Sequence: Synthetic oligonucleotide
  Target: ANGPTL4; (+) strand; PAM type: NRG; PAM sequence: TGG
gccaggctagcatctcagcg

SEQ ID NO: 11211 - DNA, 20 bp, Artificial Sequence
  Description of Artificial Sequence: Synthetic oligonucleotide
  Target: ANGPTL4; (+) strand; PAM type: NRG; PAM sequence: CAG
ggctagcatctcagcgtggt

SEQ ID NO: 11212 - DNA, 20 bp, Artificial Sequence
  Description of Artificial Sequence: Synthetic oligonucleotide
  Target: ANGPTL4; (+) strand; PAM type: NRG; PAM sequence: AGG
gctagcatctcagcgtggtc

SEQ ID NO: 11213 - DNA, 20 bp, Artificial Sequence
  Description of Artificial Sequence: Synthetic oligonucleotide
  Target: ANGPTL4; (+) strand; PAM type: NRG; PAM sequence: GGG
ctagcatctcagcgtggtca

SEQ ID NO: 11214 - DNA, 20 bp, Artificial Sequence
  Description of Artificial Sequence: Synthetic oligonucleotide
  Target: ANGPTL4; (+) strand; PAM type: NRG; PAM sequence: AAG
gggtcctgtccaccctccca

SEQ ID NO: 11215 - DNA, 20 bp, Artificial Sequence
  Description of Artificial Sequence: Synthetic oligonucleotide
  Target: ANGPTL4; (+) strand; PAM type: NRG; PAM sequence: CAG
ccctcccaaagccaccatcc

SEQ ID NO: 11216 - DNA, 20 bp, Artificial Sequence
  Description of Artificial Sequence: Synthetic oligonucleotide
  Target: ANGPTL4; (+) strand; PAM type: NRG; PAM sequence: AGG
cctcccaaagccaccatccc

SEQ ID NO: 11217 - DNA, 20 bp, Artificial Sequence
  Description of Artificial Sequence: Synthetic oligonucleotide
  Target: ANGPTL4; (+) strand; PAM type: NRG; PAM sequence: GAG
caaagccaccatcccaggat

SEQ ID NO: 11218 - DNA, 20 bp, Artificial Sequence
  Description of Artificial Sequence: Synthetic oligonucleotide
  Target: ANGPTL4; (+) strand; PAM type: NRG; PAM sequence: AGG
aaagccaccatcccaggatg

SEQ ID NO: 11219 - DNA, 20 bp, Artificial Sequence
  Description of Artificial Sequence: Synthetic oligonucleotide
  Target: ANGPTL4; (+) strand; PAM type: NRG; PAM sequence: GGG
aagccaccatcccaggatga

SEQ ID NO: 11220 - DNA, 20 bp, Artificial Sequence
  Description of Artificial Sequence: Synthetic oligonucleotide
  Target: ANGPTL4; (+) strand; PAM type: NRG; PAM sequence: GGG
agccaccatcccaggatgag

SEQ ID NO: 11221 - DNA, 20 bp, Artificial Sequence
  Description of Artificial Sequence: Synthetic oligonucleotide
  Target: ANGPTL4; (+) strand; PAM type: NRG; PAM sequence: TGG
atcccaggatgaggggcttc

SEQ ID NO: 11222 - DNA, 20 bp, Artificial Sequence
  Description of Artificial Sequence: Synthetic oligonucleotide
  Target: ANGPTL4; (+) strand; PAM type: NRG; PAM sequence: GAG
cccaggatgaggggcttctg

SEQ ID NO: 11223 - DNA, 20 bp, Artificial Sequence
  Description of Artificial Sequence: Synthetic oligonucleotide
  Target: ANGPTL4; (+) strand; PAM type: NRG; PAM sequence: AGG
ccaggatgaggggcttctgg

SEQ ID NO: 11224 - DNA, 20 bp, Artificial Sequence
  Description of Artificial Sequence: Synthetic oligonucleotide
  Target: ANGPTL4; (+) strand; PAM type: NRG; PAM sequence: GGG
caggatgaggggcttctgga

SEQ ID NO: 11225 - DNA, 20 bp, Artificial Sequence
  Description of Artificial Sequence: Synthetic oligonucleotide
  Target: ANGPTL4; (+) strand; PAM type: NRG; PAM sequence: CGG
gaggggcttctggagggtga

SEQ ID NO: 11226 - DNA, 20 bp, Artificial Sequence
  Description of Artificial Sequence: Synthetic oligonucleotide
  Target: ANGPTL4; (+) strand; PAM type: NRG; PAM sequence: GGG
aggggcttctggagggtgac

SEQ ID NO: 11227 - DNA, 20 bp, Artificial Sequence
  Description of Artificial Sequence: Synthetic oligonucleotide
  Target: ANGPTL4; (+) strand; PAM type: NRG; PAM sequence: GGG
ggggcttctggagggtgacg

SEQ ID NO: 11228 - DNA, 20 bp, Artificial Sequence
  Description of Artificial Sequence: Synthetic oligonucleotide
  Target: ANGPTL4; (+) strand; PAM type: NRG; PAM sequence: GGG
gggcttctggagggtgacgg

SEQ ID NO: 11229 - DNA, 20 bp, Artificial Sequence
  Description of Artificial Sequence: Synthetic oligonucleotide
  Target: ANGPTL4; (+) strand; PAM type: NRG; PAM sequence: AAG
cttctggagggtgacggggg

SEQ ID NO: 11230 - DNA, 20 bp, Artificial Sequence
  Description of Artificial Sequence: Synthetic oligonucleotide
  Target: ANGPTL4; (+) strand; PAM type: NRG; PAM sequence: AGG
ttctggagggtgacggggga

SEQ ID NO: 11231 - DNA, 20 bp, Artificial Sequence
  Description of Artificial Sequence: Synthetic oligonucleotide
  Target: ANGPTL4; (+) strand; PAM type: NRG; PAM sequence: AAG
agggtgacgggggaaggcac

SEQ ID NO: 11232 - DNA, 20 bp, Artificial Sequence
  Description of Artificial Sequence: Synthetic oligonucleotide
  Target: ANGPTL4; (+) strand; PAM type: NRG; PAM sequence: TGG
acgggggaaggcacaagtcc

SEQ ID NO: 11233 - DNA, 20 bp, Artificial Sequence
  Description of Artificial Sequence: Synthetic oligonucleotide
  Target: ANGPTL4; (+) strand; PAM type: NRG; PAM sequence: TGG
gggaaggcacaagtcctggc

SEQ ID NO: 11234 - DNA, 20 bp, Artificial Sequence
  Description of Artificial Sequence: Synthetic oligonucleotide
  Target: ANGPTL4; (+) strand; PAM type: NRG; PAM sequence: GGG
ggaaggcacaagtcctggct

SEQ ID NO: 11235 - DNA, 20 bp, Artificial Sequence
  Description of Artificial Sequence: Synthetic oligonucleotide
  Target: ANGPTL4; (+) strand; PAM type: NRG; PAM sequence: CGG
caagtcctggctgggaaatg

SEQ ID NO: 11236 - DNA, 20 bp, Artificial Sequence
  Description of Artificial Sequence: Synthetic oligonucleotide
  Target: ANGPTL4; (+) strand; PAM type: NRG; PAM sequence: TGG
gtcctggctgggaaatgcgg

SEQ ID NO: 11237 - DNA, 20 bp, Artificial Sequence
  Description of Artificial Sequence: Synthetic oligonucleotide
  Target: ANGPTL4; (+) strand; PAM type: NRG; PAM sequence: AAG
ctggctgggaaatgcggtgg

SEQ ID NO: 11238 - DNA, 20 bp, Artificial Sequence
  Description of Artificial Sequence: Synthetic oligonucleotide
  Target: ANGPTL4; (+) strand; PAM type: NRG; PAM sequence: AGG
tggctgggaaatgcggtgga

SEQ ID NO: 11239 - DNA, 20 bp, Artificial Sequence
  Description of Artificial Sequence: Synthetic oligonucleotide
  Target: ANGPTL4; (+) strand; PAM type: NRG; PAM sequence: GGG
ggctgggaaatgcggtggaa

SEQ ID NO: 11240 - DNA, 20 bp, Artificial Sequence
  Description of Artificial Sequence: Synthetic oligonucleotide
  Target: ANGPTL4; (+) strand; PAM type: NRG; PAM sequence: GGG
gctgggaaatgcggtggaag

SEQ ID NO: 11241 - DNA, 20 bp, Artificial Sequence
  Description of Artificial Sequence: Synthetic oligonucleotide
  Target: ANGPTL4; (+) strand; PAM type: NRG; PAM sequence: GGG
ctgggaaatgcggtggaagg

SEQ ID NO: 11242 - DNA, 20 bp, Artificial Sequence
  Description of Artificial Sequence: Synthetic oligonucleotide
  Target: ANGPTL4; (+) strand; PAM type: NRG; PAM sequence: CAG
ggaaatgcggtggaaggggg

SEQ ID NO: 11243 - DNA, 20 bp, Artificial Sequence
  Description of Artificial Sequence: Synthetic oligonucleotide
  Target: ANGPTL4; (+) strand; PAM type: NRG; PAM sequence: AGG
gaaatgcggtggaagggggc

SEQ ID NO: 11244 - DNA, 20 bp, Artificial Sequence
  Description of Artificial Sequence: Synthetic oligonucleotide
  Target: ANGPTL4; (+) strand; PAM type: NRG; PAM sequence: GGG
aaatgcggtggaagggggca

SEQ ID NO: 11245 - DNA, 20 bp, Artificial Sequence
  Description of Artificial Sequence: Synthetic oligonucleotide
  Target: ANGPTL4; (+) strand; PAM type: NRG; PAM sequence: GGG
aatgcggtggaagggggcag

SEQ ID NO: 11246 - DNA, 20 bp, Artificial Sequence
  Description of Artificial Sequence: Synthetic oligonucleotide
  Target: ANGPTL4; (+) strand; PAM type: NRG; PAM sequence: TGG
ggaagggggcaggggttctg

SEQ ID NO: 11247 - DNA, 20 bp, Artificial Sequence
  Description of Artificial Sequence: Synthetic oligonucleotide
  Target: ANGPTL4; (+) strand; PAM type: NRG; PAM sequence: GGG
gaagggggcaggggttctgt

SEQ ID NO: 11248 - DNA, 20 bp, Artificial Sequence
  Description of Artificial Sequence: Synthetic oligonucleotide
  Target: ANGPTL4; (+) strand; PAM type: NRG; PAM sequence: CGG
gggcaggggttctgtgggtt

SEQ ID NO: 11249 - DNA, 20 bp, Artificial Sequence
  Description of Artificial Sequence: Synthetic oligonucleotide
  Target: ANGPTL4; (+) strand; PAM type: NRG; PAM sequence: GGG
ggcaggggttctgtgggttc

SEQ ID NO: 11250 - DNA, 20 bp, Artificial Sequence
  Description of Artificial Sequence: Synthetic oligonucleotide
  Target: ANGPTL4; (+) strand; PAM type: NRG; PAM sequence: CAG
ttctgtgggttcgggactcc

SEQ ID NO: 11251 - DNA, 20 bp, Artificial Sequence
  Description of Artificial Sequence: Synthetic oligonucleotide
  Target: ANGPTL4; (+) strand; PAM type: NRG; PAM sequence: TGG
gttcgggactcccagactct

SEQ ID NO: 11252 - DNA, 20 bp, Artificial Sequence
  Description of Artificial Sequence: Synthetic oligonucleotide
  Target: ANGPTL4; (+) strand; PAM type: NRG; PAM sequence: CAG
ggactcccagactcttggct

SEQ ID NO: 11253 - DNA, 20 bp, Artificial Sequence
  Description of Artificial Sequence: Synthetic oligonucleotide
  Target: ANGPTL4; (+) strand; PAM type: NRG; PAM sequence: AGG
gactcccagactcttggctc

SEQ ID NO: 11254 - DNA, 20 bp, Artificial Sequence
  Description of Artificial Sequence: Synthetic oligonucleotide
  Target: ANGPTL4; (+) strand; PAM type: NRG; PAM sequence: AAG
actcttggctcaggcccgcc

SEQ ID NO: 11255 - DNA, 20 bp, Artificial Sequence
  Description of Artificial Sequence: Synthetic oligonucleotide
  Target: ANGPTL4; (+) strand; PAM type: NRG; PAM sequence: TAG
cttggctcaggcccgccaag

SEQ ID NO: 11256 - DNA, 20 bp, Artificial Sequence
  Description of Artificial Sequence: Synthetic oligonucleotide
  Target: ANGPTL4; (+) strand; PAM type: NRG; PAM sequence: AGG
ttggctcaggcccgccaagt

SEQ ID NO: 11257 - DNA, 20 bp, Artificial Sequence
  Description of Artificial Sequence: Synthetic oligonucleotide
  Target: ANGPTL4; (+) strand; PAM type: NRG; PAM sequence: GAG
ggctcaggcccgccaagtag

SEQ ID NO: 11258 - DNA, 20 bp, Artificial Sequence
  Description of Artificial Sequence: Synthetic oligonucleotide
  Target: ANGPTL4; (+) strand; PAM type: NRG; PAM sequence: AAG
caggcccgccaagtaggaga

SEQ ID NO: 11259 - DNA, 20 bp, Artificial Sequence
  Description of Artificial Sequence: Synthetic oligonucleotide
  Target: ANGPTL4; (+) strand; PAM type: NRG; PAM sequence: CAG
ccgccaagtaggagaaagtt

SEQ ID NO: 11260 - DNA, 20 bp, Artificial Sequence
  Description of Artificial Sequence: Synthetic oligonucleotide
  Target: ANGPTL4; (+) strand; PAM type: NRG; PAM sequence: GAG
gccaagtaggagaaagttca

SEQ ID NO: 11261 - DNA, 20 bp, Artificial Sequence
  Description of Artificial Sequence: Synthetic oligonucleotide
  Target: ANGPTL4; (+) strand; PAM type: NRG; PAM sequence: TGG
agtaggagaaagttcagagc

SEQ ID NO: 11262 - DNA, 20 bp, Artificial Sequence
  Description of Artificial Sequence: Synthetic oligonucleotide
  Target: ANGPTL4; (+) strand; PAM type: NRG; PAM sequence: GGG
gtaggagaaagttcagagct

SEQ ID NO: 11263 - DNA, 20 bp, Artificial Sequence
  Description of Artificial Sequence: Synthetic oligonucleotide
  Target: ANGPTL4; (+) strand; PAM type: NRG; PAM sequence: AAG
ggagaaagttcagagctggg

SEQ ID NO: 11264 - DNA, 20 bp, Artificial Sequence
  Description of Artificial Sequence: Synthetic oligonucleotide
  Target: ANGPTL4; (+) strand; PAM type: NRG; PAM sequence: AGG
gagaaagttcagagctggga

SEQ ID NO: 11265 - DNA, 20 bp, Artificial Sequence
  Description of Artificial Sequence: Synthetic oligonucleotide
  Target: ANGPTL4; (+) strand; PAM type: NRG; PAM sequence: CAG
ttcagagctgggaaggcgaa

SEQ ID NO: 11266 - DNA, 20 bp, Artificial Sequence
  Description of Artificial Sequence: Synthetic oligonucleotide
  Target: ANGPTL4; (+) strand; PAM type: NRG; PAM sequence: TGG
gagctgggaaggcgaacagc

SEQ ID NO: 11267 - DNA, 20 bp, Artificial Sequence
  Description of Artificial Sequence: Synthetic oligonucleotide
  Target: ANGPTL4; (+) strand; PAM type: NRG; PAM sequence: TGG
aggcgaacagctggcattca

SEQ ID NO: 11268 - DNA, 20 bp, Artificial Sequence
  Description of Artificial Sequence: Synthetic oligonucleotide
  Target: ANGPTL4; (+) strand; PAM type: NRG; PAM sequence: AAG
cgaacagctggcattcatgg

SEQ ID NO: 11269 - DNA, 20 bp, Artificial Sequence
  Description of Artificial Sequence: Synthetic oligonucleotide
  Target: ANGPTL4; (+) strand; PAM type: NRG; PAM sequence: TGG
ggcattcatggaagccacac

SEQ ID NO: 11270 - DNA, 20 bp, Artificial Sequence
  Description of Artificial Sequence: Synthetic oligonucleotide
  Target: ANGPTL4; (+) strand; PAM type: NRG; PAM sequence: TGG
attcatggaagccacactgg

SEQ ID NO: 11271 - DNA, 20 bp, Artificial Sequence
  Description of Artificial Sequence: Synthetic oligonucleotide
  Target: ANGPTL4; (+) strand; PAM type: NRG; PAM sequence: TGG
tggaagccacactggtggtt

SEQ ID NO: 11272 - DNA, 20 bp, Artificial Sequence
  Description of Artificial Sequence: Synthetic oligonucleotide
  Target: ANGPTL4; (+) strand; PAM type: NRG; PAM sequence: TGG
ggccgcgtgcccatccttac

SEQ ID NO: 11273 - DNA, 20 bp, Artificial Sequence
  Description of Artificial Sequence: Synthetic oligonucleotide
  Target: ANGPTL4; (+) strand; PAM type: NRG; PAM sequence: TGG
gcgtgcccatccttactgga

SEQ ID NO: 11274 - DNA, 20 bp, Artificial Sequence
  Description of Artificial Sequence: Synthetic oligonucleotide
  Target: ANGPTL4; (+) strand; PAM type: NRG; PAM sequence: GGG
cgtgcccatccttactggat

SEQ ID NO: 11275 - DNA, 20 bp, Artificial Sequence
  Description of Artificial Sequence: Synthetic oligonucleotide
  Target: ANGPTL4; (+) strand; PAM type: NRG; PAM sequence: GAG
tgcccatccttactggatgg

SEQ ID NO: 11276 - DNA, 20 bp, Artificial Sequence
  Description of Artificial Sequence: Synthetic oligonucleotide
  Target: ANGPTL4; (+) strand; PAM type: NRG; PAM sequence: AGG
gcccatccttactggatggg

SEQ ID NO: 11277 - DNA, 20 bp, Artificial Sequence
  Description of Artificial Sequence: Synthetic oligonucleotide
  Target: ANGPTL4; (+) strand; PAM type: NRG; PAM sequence: AAG
atccttactggatgggagga

SEQ ID NO: 11278 - DNA, 20 bp, Artificial Sequence
  Description of Artificial Sequence: Synthetic oligonucleotide
  Target: ANGPTL4; (+) strand; PAM type: NRG; PAM sequence: TAG
cttactggatgggaggaaag

SEQ ID NO: 11279 - DNA, 20 bp, Artificial Sequence
  Description of Artificial Sequence: Synthetic oligonucleotide
  Target: ANGPTL4; (+) strand; PAM type: NRG; PAM sequence: AGG
ttactggatgggaggaaagt

SEQ ID NO: 11280 - DNA, 20 bp, Artificial Sequence
  Description of Artificial Sequence: Synthetic oligonucleotide
  Target: ANGPTL4; (+) strand; PAM type: NRG; PAM sequence: GGG
tactggatgggaggaaagta

SEQ ID NO: 11281 - DNA, 20 bp, Artificial Sequence
  Description of Artificial Sequence: Synthetic oligonucleotide
  Target: ANGPTL4; (+) strand; PAM type: NRG; PAM sequence: GGG
actggatgggaggaaagtag

SEQ ID NO: 11282 - DNA, 20 bp, Artificial Sequence
  Description of Artificial Sequence: Synthetic oligonucleotide
  Target: ANGPTL4; (+) strand; PAM type: NRG; PAM sequence: AAG
gatgggaggaaagtagggga

SEQ ID NO: 11283 - DNA, 20 bp, Artificial Sequence
  Description of Artificial Sequence: Synthetic oligonucleotide
  Target: ANGPTL4; (+) strand; PAM type: NRG; PAM sequence: AGG
atgggaggaaagtaggggaa

SEQ ID NO: 11284 - DNA, 20 bp, Artificial Sequence
  Description of Artificial Sequence: Synthetic oligonucleotide
  Target: ANGPTL4; (+) strand; PAM type: NRG; PAM sequence: GGG
tgggaggaaagtaggggaaa

SEQ ID NO: 11285 - DNA, 20 bp, Artificial Sequence
  Description of Artificial Sequence: Synthetic oligonucleotide
  Target: ANGPTL4; (+) strand; PAM type: NRG; PAM sequence: GGG
gggaggaaagtaggggaaag

SEQ ID NO: 11286 - DNA, 20 bp, Artificial Sequence
  Description of Artificial Sequence: Synthetic oligonucleotide
  Target: ANGPTL4; (+) strand; PAM type: NRG; PAM sequence: GAG
gaggaaagtaggggaaaggg

SEQ ID NO: 11287 - DNA, 20 bp, Artificial Sequence
  Description of Artificial Sequence: Synthetic oligonucleotide
  Target: ANGPTL4; (+) strand; PAM type: NRG; PAM sequence: GAG
aggggaaaggggagatgcct

SEQ ID NO: 11288 - DNA, 20 bp, Artificial Sequence
  Description of Artificial Sequence: Synthetic oligonucleotide
  Target: ANGPTL4; (+) strand; PAM type: NRG; PAM sequence: AGG
ggggaaaggggagatgcctg

SEQ ID NO: 11289 - DNA, 20 bp, Artificial Sequence
  Description of Artificial Sequence: Synthetic oligonucleotide
  Target: ANGPTL4; (+) strand; PAM type: NRG; PAM sequence: GGG
gggaaaggggagatgcctga

SEQ ID NO: 11290 - DNA, 20 bp, Artificial Sequence
  Description of Artificial Sequence: Synthetic oligonucleotide
  Target: ANGPTL4; (+) strand; PAM type: NRG; PAM sequence: GGG
ggaaaggggagatgcctgag

SEQ ID NO: 11291 - DNA, 20 bp, Artificial Sequence
  Description of Artificial Sequence: Synthetic oligonucleotide
  Target: ANGPTL4; (+) strand; PAM type: NRG; PAM sequence: CGG
aggggagatgcctgaggggc

SEQ ID NO: 11292 - DNA, 20 bp, Artificial Sequence
  Description of Artificial Sequence: Synthetic oligonucleotide
  Target: ANGPTL4; (+) strand; PAM type: NRG; PAM sequence: AAG
gagatgcctgaggggccgga

SEQ ID NO: 11293 - DNA, 20 bp, Artificial Sequence
  Description of Artificial Sequence: Synthetic oligonucleotide
  Target: ANGPTL4; (+) strand; PAM type: NRG; PAM sequence: TGG
ggggccggaaagcgtcttcc

SEQ ID NO: 11294 - DNA, 20 bp, Artificial Sequence
  Description of Artificial Sequence: Synthetic oligonucleotide
  Target: ANGPTL4; (+) strand; PAM type: NRG; PAM sequence: TGG
aagcgtcttcctggtcactc

SEQ ID NO: 11295 - DNA, 20 bp, Artificial Sequence
  Description of Artificial Sequence: Synthetic oligonucleotide
  Target: ANGPTL4; (+) strand; PAM type: NRG; PAM sequence: GGG
agcgtcttcctggtcactct

SEQ ID NO: 11296 - DNA, 20 bp, Artificial Sequence
  Description of Artificial Sequence: Synthetic oligonucleotide
  Target: ANGPTL4; (+) strand; PAM type: NRG; PAM sequence: CAG
ccgcccccacccccaccgtg

SEQ ID NO: 11297 - DNA, 20 bp, Artificial Sequence
  Description of Artificial Sequence: Synthetic oligonucleotide
  Target: ANGPTL4; (+) strand; PAM type: NRG; PAM sequence: CGG
cgacctttcccctacttttc

SEQ ID NO: 11298 - DNA, 20 bp, Artificial Sequence
  Description of Artificial Sequence: Synthetic oligonucleotide
  Target: ANGPTL4; (+) strand; PAM type: NRG; PAM sequence: TGG
ctttcccctacttttccggc

SEQ ID NO: 11299 - DNA, 20 bp, Artificial Sequence
  Description of Artificial Sequence: Synthetic oligonucleotide
  Target: ANGPTL4; (+) strand; PAM type: NRG; PAM sequence: GGG
tttcccctacttttccggct

SEQ ID NO: 11300 - DNA, 20 bp, Artificial Sequence
  Description of Artificial Sequence: Synthetic oligonucleotide
  Target: ANGPTL4; (+) strand; PAM type: NRG; PAM sequence: TGG
ccctacttttccggctgggc

SEQ ID NO: 11301 - DNA, 20 bp, Artificial Sequence
  Description of Artificial Sequence: Synthetic oligonucleotide
  Target: ANGPTL4; (+) strand; PAM type: NRG; PAM sequence: GGG
cctacttttccggctgggct

SEQ ID NO: 11302 - DNA, 20 bp, Artificial Sequence
  Description of Artificial Sequence: Synthetic oligonucleotide
  Target: ANGPTL4; (+) strand; PAM type: NRG; PAM sequence: GGG
ctacttttccggctgggctg

SEQ ID NO: 11303 - DNA, 20 bp, Artificial Sequence
  Description of Artificial Sequence: Synthetic oligonucleotide
  Target: ANGPTL4; (+) strand; PAM type: NRG; PAM sequence: GGG
tacttttccggctgggctgg

SEQ ID NO: 11304 - DNA, 20 bp, Artificial Sequence
  Description of Artificial Sequence: Synthetic oligonucleotide
  Target: ANGPTL4; (+) strand; PAM type: NRG; PAM sequence: CGG
ttttccggctgggctggggg

SEQ ID NO: 11305 - DNA, 20 bp, Artificial Sequence
  Description of Artificial Sequence: Synthetic oligonucleotide
  Target: ANGPTL4; (+) strand; PAM type: NRG; PAM sequence: CAG
gggctgggggcggttcctcc

SEQ ID NO: 11306 - DNA, 20 bp, Artificial Sequence
  Description of Artificial Sequence: Synthetic oligonucleotide
  Target: ANGPTL4; (+) strand; PAM type: NRG; PAM sequence: TGG
gggggcggttcctcccagtc

SEQ ID NO: 11307 - DNA, 20 bp, Artificial Sequence
  Description of Artificial Sequence: Synthetic oligonucleotide
  Target: ANGPTL4; (+) strand; PAM type: NRG; PAM sequence: GAG
gggcggttcctcccagtctg

SEQ ID NO: 11308 - DNA, 20 bp, Artificial Sequence
  Description of Artificial Sequence: Synthetic oligonucleotide
  Target: ANGPTL4; (+) strand; PAM type: NRG; PAM sequence: GAG
cctcccagtctggagcgtct

SEQ ID NO: 11309 - DNA, 20 bp, Artificial Sequence
  Description of Artificial Sequence: Synthetic oligonucleotide
  Target: ANGPTL4; (+) strand; PAM type: NRG; PAM sequence: CAG
gtctggagcgtctgagcctc

SEQ ID NO: 11310 - DNA, 20 bp, Artificial Sequence
  Description of Artificial Sequence: Synthetic oligonucleotide
  Target: ANGPTL4; (+) strand; PAM type: NRG; PAM sequence: TAG
aaccctgcctcctctccctc

SEQ ID NO: 11311 - DNA, 20 bp, Artificial Sequence
  Description of Artificial Sequence: Synthetic oligonucleotide
  Target: ANGPTL4; (+) strand; PAM type: NRG; PAM sequence: AGG
accctgcctcctctccctct

SEQ ID NO: 11312 - DNA, 20 bp, Artificial Sequence
  Description of Artificial Sequence: Synthetic oligonucleotide
  Target: ANGPTL4; (+) strand; PAM type: NRG; PAM sequence: GAG
cctgcctcctctccctctag

SEQ ID NO: 11313 - DNA, 20 bp, Artificial Sequence
  Description of Artificial Sequence: Synthetic oligonucleotide
  Target: ANGPTL4; (+) strand; PAM type: NRG; PAM sequence: TGG
cctcctctccctctaggagc

SEQ ID NO: 11314 - DNA, 20 bp, Artificial Sequence
  Description of Artificial Sequence: Synthetic oligonucleotide
  Target: ANGPTL4; (+) strand; PAM type: NRG; PAM sequence: GGG
ctcctctccctctaggagct

SEQ ID NO: 11315 - DNA, 20 bp, Artificial Sequence
  Description of Artificial Sequence: Synthetic oligonucleotide
  Target: ANGPTL4; (+) strand; PAM type: NRG; PAM sequence: CAG
ccctctaggagctgggaccc

SEQ ID NO: 11316 - DNA, 20 bp, Artificial Sequence
  Description of Artificial Sequence: Synthetic oligonucleotide
  Target: ANGPTL4; (+) strand; PAM type: NRG; PAM sequence: AGG
cctctaggagctgggacccc

SEQ ID NO: 11317 - DNA, 20 bp, Artificial Sequence
  Description of Artificial Sequence: Synthetic oligonucleotide
  Target: ANGPTL4; (+) strand; PAM type: NRG; PAM sequence: CAG
ctaggagctgggaccccagg

SEQ ID NO: 11318 - DNA, 20 bp, Artificial Sequence
  Description of Artificial Sequence: Synthetic oligonucleotide
  Target: ANGPTL4; (+) strand; PAM type: NRG; PAM sequence: GAG
aggagctgggaccccaggca

SEQ ID NO: 11319 - DNA, 20 bp, Artificial Sequence
  Description of Artificial Sequence: Synthetic oligonucleotide
  Target: ANGPTL4; (+) strand; PAM type: NRG; PAM sequence: GAG
ggaccccaggcagagcctct

SEQ ID NO: 11320 - DNA, 20 bp, Artificial Sequence
  Description of Artificial Sequence: Synthetic oligonucleotide
  Target: ANGPTL4; (+) strand; PAM type: NRG; PAM sequence: CAG
gcctctgagatgctcctgct

SEQ ID NO: 11321 - DNA, 20 bp, Artificial Sequence
  Description of Artificial Sequence: Synthetic oligonucleotide
  Target: ANGPTL4; (+) strand; PAM type: NRG; PAM sequence: CAG
tgagatgctcctgctcagca

SEQ ID NO: 11322 - DNA, 20 bp, Artificial Sequence
  Description of Artificial Sequence: Synthetic oligonucleotide
  Target: ANGPTL4; (+) strand; PAM type: NRG; PAM sequence: TGG
cagcacagttcttcccgttc

SEQ ID NO: 11323 - DNA, 20 bp, Artificial Sequence
  Description of Artificial Sequence: Synthetic oligonucleotide
  Target: ANGPTL4; (+) strand; PAM type: NRG; PAM sequence: AAG
cattcattcattcatttgtc

SEQ ID NO: 11324 - DNA, 20 bp, Artificial Sequence
  Description of Artificial Sequence: Synthetic oligonucleotide
  Target: ANGPTL4; (+) strand; PAM type: NRG; PAM sequence: GAG
gactgttttgtttgcttttt

SEQ ID NO: 11325 - DNA, 20 bp, Artificial Sequence
  Description of Artificial Sequence: Synthetic oligonucleotide
  Target: ANGPTL4; (+) strand; PAM type: NRG; PAM sequence: CGG
gttttgtttgctttttgaga

SEQ ID NO: 11326 - DNA, 20 bp, Artificial Sequence
  Description of Artificial Sequence: Synthetic oligonucleotide
  Target: ANGPTL4; (+) strand; PAM type: NRG; PAM sequence: GAG
tttgtttgctttttgagacg

SEQ ID NO: 11327 - DNA, 20 bp, Artificial Sequence
  Description of Artificial Sequence: Synthetic oligonucleotide
  Target: ANGPTL4; (+) strand; PAM type: NRG; PAM sequence: CAG
cggagtctcgctctgttgtc

SEQ ID NO: 11328 - DNA, 20 bp, Artificial Sequence
  Description of Artificial Sequence: Synthetic oligonucleotide
  Target: ANGPTL4; (+) strand; PAM type: NRG; PAM sequence: AGG
ggagtctcgctctgttgtcc

SEQ ID NO: 11329 - DNA, 20 bp, Artificial Sequence
  Description of Artificial Sequence: Synthetic oligonucleotide
  Target: ANGPTL4; (+) strand; PAM type: NRG; PAM sequence: TGG
tctcgctctgttgtccaggc

SEQ ID NO: 11330 - DNA, 20 bp, Artificial Sequence
  Description of Artificial Sequence: Synthetic oligonucleotide
  Target: ANGPTL4; (+) strand; PAM type: NRG; PAM sequence: GAG
tcgctctgttgtccaggctg

SEQ ID NO: 11331 - DNA, 20 bp, Artificial Sequence
  Description of Artificial Sequence: Synthetic oligonucleotide
  Target: ANGPTL4; (+) strand; PAM type: NRG; PAM sequence: CAG
ctgttgtccaggctggagtg

SEQ ID NO: 11332 - DNA, 20 bp, Artificial Sequence
  Description of Artificial Sequence: Synthetic oligonucleotide
  Target: ANGPTL4; (+) strand; PAM type: NRG; PAM sequence: TGG
ttgtccaggctggagtgcag

SEQ ID NO: 11333 - DNA, 20 bp, Artificial Sequence
  Description of Artificial Sequence: Synthetic oligonucleotide
  Target: ANGPTL4; (+) strand; PAM type: NRG; PAM sequence: CAG
ggagtgcagtggcgcaatct

SEQ ID NO: 11334 - DNA, 20 bp, Artificial Sequence
  Description of Artificial Sequence: Synthetic oligonucleotide
  Target: ANGPTL4; (+) strand; PAM type: NRG; PAM sequence: TGG
ctgcaacctctgcctcccac

SEQ ID NO: 11335 - DNA, 20 bp, Artificial Sequence
  Description of Artificial Sequence: Synthetic oligonucleotide
  Target: ANGPTL4; (+) strand; PAM type: NRG; PAM sequence: GGG
tgcaacctctgcctcccact

SEQ ID NO: 11336 - DNA, 20 bp, Artificial Sequence
  Description of Artificial Sequence: Synthetic oligonucleotide
  Target: ANGPTL4; (+) strand; PAM type: NRG; PAM sequence: AAG
ctctgcctcccactgggttc

SEQ ID NO: 11337 - DNA, 20 bp, Artificial Sequence
  Description of Artificial Sequence: Synthetic oligonucleotide
  Target: ANGPTL4; (+) strand; PAM type: NRG; PAM sequence: CAG
ttcaagtgattctcctgcct

SEQ ID NO: 11338 - DNA, 20 bp, Artificial Sequence
  Description of Artificial Sequence: Synthetic oligonucleotide
  Target: ANGPTL4; (+) strand; PAM type: NRG; PAM sequence: AAG
ttctcctgcctcagcctctc

SEQ ID NO: 11339 - DNA, 20 bp, Artificial Sequence
  Description of Artificial Sequence: Synthetic oligonucleotide
  Target: ANGPTL4; (+) strand; PAM type: NRG; PAM sequence: TAG
tcctgcctcagcctctcaag

SEQ ID NO: 11340 - DNA, 20 bp, Artificial Sequence
  Description of Artificial Sequence: Synthetic oligonucleotide
  Target: ANGPTL4; (+) strand; PAM type: NRG; PAM sequence: TGG
gcctcagcctctcaagtaga

SEQ ID NO: 11341 - DNA, 20 bp, Artificial Sequence
  Description of Artificial Sequence: Synthetic oligonucleotide
  Target: ANGPTL4; (+) strand; PAM type: NRG; PAM sequence: GGG
cctcagcctctcaagtagat

SEQ ID NO: 11342 - DNA, 20 bp, Artificial Sequence
  Description of Artificial Sequence: Synthetic oligonucleotide
  Target: ANGPTL4; (+) strand; PAM type: NRG; PAM sequence: TAG
ctctcaagtagatgggatta

SEQ ID NO: 11343 - DNA, 20 bp, Artificial Sequence
  Description of Artificial Sequence: Synthetic oligonucleotide
  Target: ANGPTL4; (+) strand; PAM type: NRG; PAM sequence: AGG
tctcaagtagatgggattat

SEQ ID NO: 11344 - DNA, 20 bp, Artificial Sequence
  Description of Artificial Sequence: Synthetic oligonucleotide
  Target: ANGPTL4; (+) strand; PAM type: NRG; PAM sequence: CAG
gcgcctaccgccaccacgcc

SEQ ID NO: 11345 - DNA, 20 bp, Artificial Sequence
  Description of Artificial Sequence: Synthetic oligonucleotide
  Target: ANGPTL4; (+) strand; PAM type: NRG; PAM sequence: AAG
ctaatttttattcatttatc

SEQ ID NO: 11346 - DNA, 20 bp, Artificial Sequence
  Description of Artificial Sequence: Synthetic oligonucleotide
  Target: ANGPTL4; (+) strand; PAM type: NRG; PAM sequence: GAG
atcaagtctttttttttttt

SEQ ID NO: 11347 - DNA, 20 bp, Artificial Sequence
  Description of Artificial Sequence: Synthetic oligonucleotide
  Target: ANGPTL4; (+) strand; PAM type: NRG; PAM sequence: CAG
agtcttttttttttttgaga

SEQ ID NO: 11348 - DNA, 20 bp, Artificial Sequence
  Description of Artificial Sequence: Synthetic oligonucleotide
  Target: ANGPTL4; (+) strand; PAM type: NRG; PAM sequence: GAG
tcttttttttttttgagaca

SEQ ID NO: 11349 - DNA, 20 bp, Artificial Sequence
  Description of Artificial Sequence: Synthetic oligonucleotide
  Target: ANGPTL4; (+) strand; PAM type: NRG; PAM sequence: CAG
cagagtctcactctgtcacc

SEQ ID NO: 11350 - DNA, 20 bp, Artificial Sequence
  Description of Artificial Sequence: Synthetic oligonucleotide
  Target: ANGPTL4; (+) strand; PAM type: NRG; PAM sequence: AGG
agagtctcactctgtcaccc

SEQ ID NO: 11351 - DNA, 20 bp, Artificial Sequence
  Description of Artificial Sequence: Synthetic oligonucleotide
  Target: ANGPTL4; (+) strand; PAM type: NRG; PAM sequence: TGG
tctcactctgtcacccaggt

SEQ ID NO: 11352 - DNA, 20 bp, Artificial Sequence
  Description of Artificial Sequence: Synthetic oligonucleotide
  Target: ANGPTL4; (+) strand; PAM type: NRG; PAM sequence: GAG
tcactctgtcacccaggttg

SEQ ID NO: 11353 - DNA, 20 bp, Artificial Sequence
  Description of Artificial Sequence: Synthetic oligonucleotide
  Target: ANGPTL4; (+) strand; PAM type: NRG; PAM sequence: TGG
tcacccaggttggagtgcaa

SEQ ID NO: 11354 - DNA, 20 bp, Artificial Sequence
  Description of Artificial Sequence: Synthetic oligonucleotide
  Target: ANGPTL4; (+) strand; PAM type: NRG; PAM sequence: CAG
ggagtgcaatggttcaacct

SEQ ID NO: 11355 - DNA, 20 bp, Artificial Sequence
  Description of Artificial Sequence: Synthetic oligonucleotide
  Target: ANGPTL4; (+) strand; PAM type: NRG; PAM sequence: CGG
tgactgcaacctctgcctcc

SEQ ID NO: 11356 - DNA, 20 bp, Artificial Sequence
  Description of Artificial Sequence: Synthetic oligonucleotide
  Target: ANGPTL4; (+) strand; PAM type: NRG; PAM sequence: GGG
gactgcaacctctgcctccc

SEQ ID NO: 11357 - DNA, 20 bp, Artificial Sequence
  Description of Artificial Sequence: Synthetic oligonucleotide
  Target: ANGPTL4; (+) strand; PAM type: NRG; PAM sequence: AAG
aacctctgcctcccgggttc

SEQ ID NO: 11358 - DNA, 20 bp, Artificial Sequence
  Description of Artificial Sequence: Synthetic oligonucleotide
  Target: ANGPTL4; (+) strand; PAM type: NRG; PAM sequence: AAG
ttctcctgcctctgcctcct

SEQ ID NO: 11359 - DNA, 20 bp, Artificial Sequence
  Description of Artificial Sequence: Synthetic oligonucleotide
  Target: ANGPTL4; (+) strand; PAM type: NRG; PAM sequence: AGG
tctcctgcctctgcctccta

SEQ ID NO: 11360 - DNA, 20 bp, Artificial Sequence
  Description of Artificial Sequence: Synthetic oligonucleotide
  Target: ANGPTL4; (+) strand; PAM type: NRG; PAM sequence: GAG
tcctgcctctgcctcctaag

SEQ ID NO: 11361 - DNA, 20 bp, Artificial Sequence
  Description of Artificial Sequence: Synthetic oligonucleotide
  Target: ANGPTL4; (+) strand; PAM type: NRG; PAM sequence: TGG
gcctctgcctcctaaggagc

SEQ ID NO: 11362 - DNA, 20 bp, Artificial Sequence
  Description of Artificial Sequence: Synthetic oligonucleotide
  Target: ANGPTL4; (+) strand; PAM type: NRG; PAM sequence: GGG
cctctgcctcctaaggagct

SEQ ID NO: 11363 - DNA, 20 bp, Artificial Sequence
  Description of Artificial Sequence: Synthetic oligonucleotide
  Target: ANGPTL4; (+) strand; PAM type: NRG; PAM sequence: TGG
tcctaaggagctgggattac

SEQ ID NO: 11364 - DNA, 20 bp, Artificial Sequence
  Description of Artificial Sequence: Synthetic oligonucleotide
  Target: ANGPTL4; (+) strand; PAM type: NRG; PAM sequence: CAG
ctggcgtccaccatcacacc

SEQ ID NO: 11365 - DNA, 20 bp, Artificial Sequence
  Description of Artificial Sequence: Synthetic oligonucleotide
  Target: ANGPTL4; (+) strand; PAM type: NRG; PAM sequence: TAG
ctaatctttgtatgttttac

SEQ ID NO: 11366 - DNA, 20 bp, Artificial Sequence
  Description of Artificial Sequence: Synthetic oligonucleotide
  Target: ANGPTL4; (+) strand; PAM type: NRG; PAM sequence: GAG
aatctttgtatgttttacta

SEQ ID NO: 11367 - DNA, 20 bp, Artificial Sequence
  Description of Artificial Sequence: Synthetic oligonucleotide
  Target: ANGPTL4; (+) strand; PAM type: NRG; PAM sequence: TGG
tttgtatgttttactagaga

SEQ ID NO: 11368 - DNA, 20 bp, Artificial Sequence
  Description of Artificial Sequence: Synthetic oligonucleotide
  Target: ANGPTL4; (+) strand; PAM type: NRG; PAM sequence: GGG
ttgtatgttttactagagat

SEQ ID NO: 11369 - DNA, 20 bp, Artificial Sequence
  Description of Artificial Sequence: Synthetic oligonucleotide
  Target: ANGPTL4; (+) strand; PAM type: NRG; PAM sequence: GGG
tgtatgttttactagagatg

SEQ ID NO: 11370 - DNA, 20 bp, Artificial Sequence
  Description of Artificial Sequence: Synthetic oligonucleotide
  Target: ANGPTL4; (+) strand; PAM type: NRG; PAM sequence: TGG
gttttactagagatggggtt

SEQ ID NO: 11371 - DNA, 20 bp, Artificial Sequence
  Description of Artificial Sequence: Synthetic oligonucleotide
  Target: ANGPTL4; (+) strand; PAM type: NRG; PAM sequence: CAG
tggggtttggccatgttgac

SEQ ID NO: 11372 - DNA, 20 bp, Artificial Sequence
  Description of Artificial Sequence: Synthetic oligonucleotide
  Target: ANGPTL4; (+) strand; PAM type: NRG; PAM sequence: AGG
ggggtttggccatgttgacc

SEQ ID NO: 11373 - DNA, 20 bp, Artificial Sequence
  Description of Artificial Sequence: Synthetic oligonucleotide
  Target: ANGPTL4; (+) strand; PAM type: NRG; PAM sequence: TGG
tttggccatgttgaccaggc

SEQ ID NO: 11374 - DNA, 20 bp, Artificial Sequence
  Description of Artificial Sequence: Synthetic oligonucleotide
  Target: ANGPTL4; (+) strand; PAM type: NRG; PAM sequence: AAG
accgatccgcccgcctccca

SEQ ID NO: 11375 - DNA, 20 bp, Artificial Sequence
  Description of Artificial Sequence: Synthetic oligonucleotide
  Target: ANGPTL4; (+) strand; PAM type: NRG; PAM sequence: TGG
ccgcccgcctcccaaagtgc

SEQ ID NO: 11376 - DNA, 20 bp, Artificial Sequence
  Description of Artificial Sequence: Synthetic oligonucleotide
  Target: ANGPTL4; (+) strand; PAM type: NRG; PAM sequence: CAG
cctcccaaagtgctggatta

SEQ ID NO: 11377 - DNA, 20 bp, Artificial Sequence
  Description of Artificial Sequence: Synthetic oligonucleotide
  Target: ANGPTL4; (+) strand; PAM type: NRG; PAM sequence: AGG
ctcccaaagtgctggattac

SEQ ID NO: 11378 - DNA, 20 bp, Artificial Sequence
  Description of Artificial Sequence: Synthetic oligonucleotide
  Target: ANGPTL4; (+) strand; PAM type: NRG; PAM sequence: CGG
caggcatgaaccactgcgcc

SEQ ID NO: 11379 - DNA, 20 bp, Artificial Sequence
  Description of Artificial Sequence: Synthetic oligonucleotide
  Target: ANGPTL4; (+) strand; PAM type: NRG; PAM sequence: AAG
ctgcgcccggcccattcctc

SEQ ID NO: 11380 - DNA, 20 bp, Artificial Sequence
  Description of Artificial Sequence: Synthetic oligonucleotide
  Target: ANGPTL4; (+) strand; PAM type: NRG; PAM sequence: GAG
ccattcctcaagtctttatt

SEQ ID NO: 11381 - DNA, 20 bp, Artificial Sequence
  Description of Artificial Sequence: Synthetic oligonucleotide
  Target: ANGPTL4; (+) strand; PAM type: NRG; PAM sequence: CAG
ttcctcaagtctttattgag

SEQ ID NO: 11382 - DNA, 20 bp, Artificial Sequence
  Description of Artificial Sequence: Synthetic oligonucleotide
  Target: ANGPTL4; (+) strand; PAM type: NRG; PAM sequence: TGG
attgagcagctgctatgcgc

SEQ ID NO: 11383 - DNA, 20 bp, Artificial Sequence
  Description of Artificial Sequence: Synthetic oligonucleotide
  Target: ANGPTL4; (+) strand; PAM type: NRG; PAM sequence: GGG
ttgagcagctgctatgcgct

SEQ ID NO: 11384 - DNA, 20 bp, Artificial Sequence
  Description of Artificial Sequence: Synthetic oligonucleotide
  Target: ANGPTL4; (+) strand; PAM type: NRG; PAM sequence: GGG
tgagcagctgctatgcgctg

SEQ ID NO: 11385 - DNA, 20 bp, Artificial Sequence
  Description of Artificial Sequence: Synthetic oligonucleotide
  Target: ANGPTL4; (+) strand; PAM type: NRG; PAM sequence: TGG
gctatgcgctggggcctgcg

SEQ ID NO: 11386 - DNA, 20 bp, Artificial Sequence
  Description of Artificial Sequence: Synthetic oligonucleotide
  Target: ANGPTL4; (+) strand; PAM type: NRG; PAM sequence: TGG
gctggggcctgcgtggatgc

SEQ ID NO: 11387 - DNA, 20 bp, Artificial Sequence
  Description of Artificial Sequence: Synthetic oligonucleotide
  Target: ANGPTL4; (+) strand; PAM type: NRG; PAM sequence: CAG
gcctgcgtggatgctggtgc

SEQ ID NO: 11388 - DNA, 20 bp, Artificial Sequence
  Description of Artificial Sequence: Synthetic oligonucleotide
  Target: ANGPTL4; (+) strand; PAM type: NRG; PAM sequence: AGG
cctgcgtggatgctggtgcc

SEQ ID NO: 11389 - DNA, 20 bp, Artificial Sequence
  Description of Artificial Sequence: Synthetic oligonucleotide
  Target: ANGPTL4; (+) strand; PAM type: NRG; PAM sequence: TGG
tggatgctggtgccaggctg

SEQ ID NO: 11390 - DNA, 20 bp, Artificial Sequence
  Description of Artificial Sequence: Synthetic oligonucleotide
  Target: ANGPTL4; (+) strand; PAM type: NRG; PAM sequence: GGG
ggatgctggtgccaggctgt

SEQ ID NO: 11391 - DNA, 20 bp, Artificial Sequence
  Description of Artificial Sequence: Synthetic oligonucleotide
  Target: ANGPTL4; (+) strand; PAM type: NRG; PAM sequence: CAG
tgctggtgccaggctgtggg

SEQ ID NO: 11392 - DNA, 20 bp, Artificial Sequence
  Description of Artificial Sequence: Synthetic oligonucleotide
  Target: ANGPTL4; (+) strand; PAM type: NRG; PAM sequence: GAG
ctggtgccaggctgtgggca

SEQ ID NO: 11393 - DNA, 20 bp, Artificial Sequence
  Description of Artificial Sequence: Synthetic oligonucleotide
  Target: ANGPTL4; (+) strand; PAM type: NRG; PAM sequence: CAG
gcagagctgctccttgtccc

SEQ ID NO: 11394 - DNA, 20 bp, Artificial Sequence
  Description of Artificial Sequence: Synthetic oligonucleotide
  Target: ANGPTL4; (+) strand; PAM type: NRG; PAM sequence: TGG
gctccttgtccccagcctca

SEQ ID NO: 11395 - DNA, 20 bp, Artificial Sequence
  Description of Artificial Sequence: Synthetic oligonucleotide
  Target: ANGPTL4; (+) strand; PAM type: NRG; PAM sequence: GAG
tccttgtccccagcctcatg

SEQ ID NO: 11396 - DNA, 20 bp, Artificial Sequence
  Description of Artificial Sequence: Synthetic oligonucleotide
  Target: ANGPTL4; (+) strand; PAM type: NRG; PAM sequence: GAG
agcctcatggagcctccatt

SEQ ID NO: 11397 - DNA, 20 bp, Artificial Sequence
  Description of Artificial Sequence: Synthetic oligonucleotide
  Target: ANGPTL4; (+) strand; PAM type: NRG; PAM sequence: CAG
tcatggagcctccattgagt

SEQ ID NO: 11398 - DNA, 20 bp, Artificial Sequence
  Description of Artificial Sequence: Synthetic oligonucleotide
  Target: ANGPTL4; (+) strand; PAM type: NRG; PAM sequence: GAG
atggagcctccattgagtca

SEQ ID NO: 11399 - DNA, 20 bp, Artificial Sequence
  Description of Artificial Sequence: Synthetic oligonucleotide
  Target: ANGPTL4; (+) strand; PAM type: NRG; PAM sequence: AGG
tggagcctccattgagtcag

SEQ ID NO: 11400 - DNA, 20 bp, Artificial Sequence
  Description of Artificial Sequence: Synthetic oligonucleotide
  Target: ANGPTL4; (+) strand; PAM type: NRG; PAM sequence: GAG
gagcctccattgagtcagag

SEQ ID NO: 11401 - DNA, 20 bp, Artificial Sequence
  Description of Artificial Sequence: Synthetic oligonucleotide
  Target: ANGPTL4; (+) strand; PAM type: NRG; PAM sequence: GAG
gcctccattgagtcagagga

SEQ ID NO: 11402 - DNA, 20 bp, Artificial Sequence
  Description of Artificial Sequence: Synthetic oligonucleotide
  Target: ANGPTL4; (+) strand; PAM type: NRG; PAM sequence: TAG
tgagtcagaggagagaccat

SEQ ID NO: 11403 - DNA, 20 bp, Artificial Sequence
  Description of Artificial Sequence: Synthetic oligonucleotide
  Target: ANGPTL4; (+) strand; PAM type: NRG; PAM sequence: CAG
gagagaccattagatgacct

SEQ ID NO: 11404 - DNA, 20 bp, Artificial Sequence
  Description of Artificial Sequence: Synthetic oligonucleotide
  Target: ANGPTL4; (+) strand; PAM type: NRG; PAM sequence: CAG
cattagatgacctcagtgtc

SEQ ID NO: 11405 - DNA, 20 bp, Artificial Sequence
  Description of Artificial Sequence: Synthetic oligonucleotide
  Target: ANGPTL4; (+) strand; PAM type: NRG; PAM sequence: AGG
attagatgacctcagtgtcc

SEQ ID NO: 11406 - DNA, 20 bp, Artificial Sequence
  Description of Artificial Sequence: Synthetic oligonucleotide
  Target: ANGPTL4; (+) strand; PAM type: NRG; PAM sequence: GAG
tagatgacctcagtgtccag

SEQ ID NO: 11407 - DNA, 20 bp, Artificial Sequence
  Description of Artificial Sequence: Synthetic oligonucleotide
  Target: ANGPTL4; (+) strand; PAM type: NRG; PAM sequence: TGG
atgacctcagtgtccaggag

SEQ ID NO: 11408 - DNA, 20 bp, Artificial Sequence
  Description of Artificial Sequence: Synthetic oligonucleotide
  Target: ANGPTL4; (+) strand; PAM type: NRG; PAM sequence: GGG
tgacctcagtgtccaggagt

SEQ ID NO: 11409 - DNA, 20 bp, Artificial Sequence
  Description of Artificial Sequence: Synthetic oligonucleotide
  Target: ANGPTL4; (+) strand; PAM type: NRG; PAM sequence: AAG
cctcagtgtccaggagtggg

SEQ ID NO: 11410 - DNA, 20 bp, Artificial Sequence
  Description of Artificial Sequence: Synthetic oligonucleotide
  Target: ANGPTL4; (+) strand; PAM type: NRG; PAM sequence: TGG
gtccttgctcaattcccatt

SEQ ID NO: 11411 - DNA, 20 bp, Artificial Sequence
  Description of Artificial Sequence: Synthetic oligonucleotide
  Target: ANGPTL4; (+) strand; PAM type: NRG; PAM sequence: GGG
tccttgctcaattcccattt

SEQ ID NO: 11412 - DNA, 20 bp, Artificial Sequence
  Description of Artificial Sequence: Synthetic oligonucleotide
  Target: ANGPTL4; (+) strand; PAM type: NRG; PAM sequence: GGG
ccttgctcaattcccatttg

SEQ ID NO: 11413 - DNA, 20 bp, Artificial Sequence
  Description of Artificial Sequence: Synthetic oligonucleotide
  Target: ANGPTL4; (+) strand; PAM type: NRG; PAM sequence: TGG
aattcccatttggggtgttc

SEQ ID NO: 11414 - DNA, 20 bp, Artificial Sequence
  Description of Artificial Sequence: Synthetic oligonucleotide
  Target: ANGPTL4; (+) strand; PAM type: NRG; PAM sequence: TGG
ccatttggggtgttctggcc

SEQ ID NO: 11415 - DNA, 20 bp, Artificial Sequence
  Description of Artificial Sequence: Synthetic oligonucleotide
  Target: ANGPTL4; (+) strand; PAM type: NRG; PAM sequence: TGG
tggggtgttctggcctggtc

SEQ ID NO: 11416 - DNA, 20 bp, Artificial Sequence
  Description of Artificial Sequence: Synthetic oligonucleotide
  Target: ANGPTL4; (+) strand; PAM type: NRG; PAM sequence: GGG
ggggtgttctggcctggtct

SEQ ID NO: 11417 - DNA, 20 bp, Artificial Sequence
  Description of Artificial Sequence: Synthetic oligonucleotide
  Target: ANGPTL4; (+) strand; PAM type: NRG; PAM sequence: GGG
gggtgttctggcctggtctg

SEQ ID NO: 11418 - DNA, 20 bp, Artificial Sequence
  Description of Artificial Sequence: Synthetic oligonucleotide
  Target: ANGPTL4; (+) strand; PAM type: NRG; PAM sequence: GGG
ggtgttctggcctggtctgg

SEQ ID NO: 11419 - DNA, 20 bp, Artificial Sequence
  Description of Artificial Sequence: Synthetic oligonucleotide
  Target: ANGPTL4; (+) strand; PAM type: NRG; PAM sequence: GAG
ttctggcctggtctgggggt

SEQ ID NO: 11420 - DNA, 20 bp, Artificial Sequence
  Description of Artificial Sequence: Synthetic oligonucleotide
  Target: ANGPTL4; (+) strand; PAM type: NRG; PAM sequence: AGG
tctggcctggtctgggggtg

SEQ ID NO: 11421 - DNA, 20 bp, Artificial Sequence
  Description of Artificial Sequence: Synthetic oligonucleotide
  Target: ANGPTL4; (+) strand; PAM type: NRG; PAM sequence: AAG
gcctggtctgggggtgaggc

SEQ ID NO: 11422 - DNA, 20 bp, Artificial Sequence
  Description of Artificial Sequence: Synthetic oligonucleotide
  Target: ANGPTL4; (+) strand; PAM type: NRG; PAM sequence: AGG
cctggtctgggggtgaggca

SEQ ID NO: 11423 - DNA, 20 bp, Artificial Sequence
  Description of Artificial Sequence: Synthetic oligonucleotide
  Target: ANGPTL4; (+) strand; PAM type: NRG; PAM sequence: CAG
ggtctgggggtgaggcaagg

SEQ ID NO: 11424 - DNA, 20 bp, Artificial Sequence
  Description of Artificial Sequence: Synthetic oligonucleotide
  Target: ANGPTL4; (+) strand; PAM type: NRG; PAM sequence: AGG
gtctgggggtgaggcaaggc

SEQ ID NO: 11425 - DNA, 20 bp, Artificial Sequence
  Description of Artificial Sequence: Synthetic oligonucleotide
  Target: ANGPTL4; (+) strand; PAM type: NRG; PAM sequence: GGG
tctgggggtgaggcaaggca

SEQ ID NO: 11426 - DNA, 20 bp, Artificial Sequence
  Description of Artificial Sequence: Synthetic oligonucleotide
  Target: ANGPTL4; (+) strand; PAM type: NRG; PAM sequence: CAG
ggcaaggcagggtgtccttc

SEQ ID NO: 11427 - DNA, 20 bp, Artificial Sequence
  Description of Artificial Sequence: Synthetic oligonucleotide
  Target: ANGPTL4; (+) strand; PAM type: NRG; PAM sequence: AAG
aaggcagggtgtccttccag

SEQ ID NO: 11428 - DNA, 20 bp, Artificial Sequence
  Description of Artificial Sequence: Synthetic oligonucleotide
  Target: ANGPTL4; (+) strand; PAM type: NRG; PAM sequence: TGG
cagggtgtccttccagaagc

SEQ ID NO: 11429 - DNA, 20 bp, Artificial Sequence
  Description of Artificial Sequence: Synthetic oligonucleotide
  Target: ANGPTL4; (+) strand; PAM type: NRG; PAM sequence: GGG
agggtgtccttccagaagct

SEQ ID NO: 11430 - DNA, 20 bp, Artificial Sequence
  Description of Artificial Sequence: Synthetic oligonucleotide
  Target: ANGPTL4; (+) strand; PAM type: NRG; PAM sequence: CAG
tccttccagaagctgggacc

SEQ ID NO: 11431 - DNA, 20 bp, Artificial Sequence
  Description of Artificial Sequence: Synthetic oligonucleotide
  Target: ANGPTL4; (+) strand; PAM type: NRG; PAM sequence: GAG
cttccagaagctgggaccca

SEQ ID NO: 11432 - DNA, 20 bp, Artificial Sequence
  Description of Artificial Sequence: Synthetic oligonucleotide
  Target: ANGPTL4; (+) strand; PAM type: NRG; PAM sequence: GAG
tccagaagctgggacccaga

SEQ ID NO: 11433 - DNA, 20 bp, Artificial Sequence
  Description of Artificial Sequence: Synthetic oligonucleotide
  Target: ANGPTL4; (+) strand; PAM type: NRG; PAM sequence: GAG
cagaagctgggacccagaga

SEQ ID NO: 11434 - DNA, 20 bp, Artificial Sequence
  Description of Artificial Sequence: Synthetic oligonucleotide
  Target: ANGPTL4; (+) strand; PAM type: NRG; PAM sequence: AAG
aagctgggacccagagagag

SEQ ID NO: 11435 - DNA, 20 bp, Artificial Sequence
  Description of Artificial Sequence: Synthetic oligonucleotide
  Target: ANGPTL4; (+) strand; PAM type: NRG; PAM sequence: GAG
tgggacccagagagagaagt

SEQ ID NO: 11436 - DNA, 20 bp, Artificial Sequence
  Description of Artificial Sequence: Synthetic oligonucleotide
  Target: ANGPTL4; (+) strand; PAM type: NRG; PAM sequence: AGG
gggacccagagagagaagtg

SEQ ID NO: 11437 - DNA, 20 bp, Artificial Sequence
  Description of Artificial Sequence: Synthetic oligonucleotide
  Target: ANGPTL4; (+) strand; PAM type: NRG; PAM sequence: AAG
cccagagagagaagtgagga

SEQ ID NO: 11438 - DNA, 20 bp, Artificial Sequence
  Description of Artificial Sequence: Synthetic oligonucleotide
  Target: ANGPTL4; (+) strand; PAM type: NRG; PAM sequence: GAG
cagagagagaagtgaggaaa

SEQ ID NO: 11439 - DNA, 20 bp, Artificial Sequence
  Description of Artificial Sequence: Synthetic oligonucleotide
  Target: ANGPTL4; (+) strand; PAM type: NRG; PAM sequence: GAG
gagagagaagtgaggaaaga

SEQ ID NO: 11440 - DNA, 20 bp, Artificial Sequence
  Description of Artificial Sequence: Synthetic oligonucleotide
  Target: ANGPTL4; (+) strand; PAM type: NRG; PAM sequence: CGG
gtgaggaaagagagtcccgc

SEQ ID NO: 11441 - DNA, 20 bp, Artificial Sequence
  Description of Artificial Sequence: Synthetic oligonucleotide
  Target: ANGPTL4; (+) strand; PAM type: NRG; PAM sequence: GGG
tgaggaaagagagtcccgcc

SEQ ID NO: 11442 - DNA, 20 bp, Artificial Sequence
  Description of Artificial Sequence: Synthetic oligonucleotide
  Target: ANGPTL4; (+) strand; PAM type: NRG; PAM sequence: CAG
aaagagagtcccgccgggcg

SEQ ID NO: 11443 - DNA, 20 bp, Artificial Sequence
  Description of Artificial Sequence: Synthetic oligonucleotide
  Target: ANGPTL4; (+) strand; PAM type: NRG; PAM sequence: TGG
gagagtcccgccgggcgcag

SEQ ID NO: 11444 - DNA, 20 bp, Artificial Sequence
  Description of Artificial Sequence: Synthetic oligonucleotide
  Target: ANGPTL4; (+) strand; PAM type: NRG; PAM sequence: CAG
gtggttcacacctgtaatcc

SEQ ID NO: 11445 - DNA, 20 bp, Artificial Sequence
  Description of Artificial Sequence: Synthetic oligonucleotide
  Target: ANGPTL4; (+) strand; PAM type: NRG; PAM sequence: TGG
cacctgtaatcccagcactt

SEQ ID NO: 11446 - DNA, 20 bp, Artificial Sequence
  Description of Artificial Sequence: Synthetic oligonucleotide
  Target: ANGPTL4; (+) strand; PAM type: NRG; PAM sequence: GGG
acctgtaatcccagcacttt

SEQ ID NO: 11447 - DNA, 20 bp, Artificial Sequence
  Description of Artificial Sequence: Synthetic oligonucleotide
  Target: ANGPTL4; (+) strand; PAM type: NRG; PAM sequence: GAG
ctgtaatcccagcactttgg

SEQ ID NO: 11448 - DNA, 20 bp, Artificial Sequence
  Description of Artificial Sequence: Synthetic oligonucleotide
  Target: ANGPTL4; (+) strand; PAM type: NRG; PAM sequence: AGG
tgtaatcccagcactttggg

SEQ ID NO: 11449 - DNA, 20 bp, Artificial Sequence
  Description of Artificial Sequence: Synthetic oligonucleotide
  Target: ANGPTL4; (+) strand; PAM type: NRG; PAM sequence: AAG
tcccagcactttgggaggcc

SEQ ID NO: 11450 - DNA, 20 bp, Artificial Sequence
  Description of Artificial Sequence: Synthetic oligonucleotide
  Target: ANGPTL4; (+) strand; PAM type: NRG; PAM sequence: AGG
cccagcactttgggaggcca

SEQ ID NO: 11451 - DNA, 20 bp, Artificial Sequence
  Description of Artificial Sequence: Synthetic oligonucleotide
  Target: ANGPTL4; (+) strand; PAM type: NRG; PAM sequence: TGG
gcactttgggaggccaaggc

SEQ ID NO: 11452 - DNA, 20 bp, Artificial Sequence
  Description of Artificial Sequence: Synthetic oligonucleotide
  Target: ANGPTL4; (+) strand; PAM type: NRG; PAM sequence: CGG
ctttgggaggccaaggctgg

SEQ ID NO: 11453 - DNA, 20 bp, Artificial Sequence
  Description of Artificial Sequence: Synthetic oligonucleotide
  Target: ANGPTL4; (+) strand; PAM type: NRG; PAM sequence: GAG
ggccaaggctggcggatcac

SEQ ID NO: 11454 - DNA, 20 bp, Artificial Sequence
  Description of Artificial Sequence: Synthetic oligonucleotide
  Target: ANGPTL4; (+) strand; PAM type: NRG; PAM sequence: AGG
gccaaggctggcggatcacg

SEQ ID NO: 11455 - DNA, 20 bp, Artificial Sequence
  Description of Artificial Sequence: Synthetic oligonucleotide
  Target: ANGPTL4; (+) strand; PAM type: NRG; PAM sequence: CAG
aggctggcggatcacgaggt

SEQ ID NO: 11456 - DNA, 20 bp, Artificial Sequence
  Description of Artificial Sequence: Synthetic oligonucleotide
  Target: ANGPTL4; (+) strand; PAM type: NRG; PAM sequence: AGG
ggctggcggatcacgaggtc

SEQ ID NO: 11457 - DNA, 20 bp, Artificial Sequence
  Description of Artificial Sequence: Synthetic oligonucleotide
  Target: ANGPTL4; (+) strand; PAM type: NRG; PAM sequence: GAG
ctggcggatcacgaggtcag

SEQ ID NO: 11458 - DNA, 20 bp, Artificial Sequence
  Description of Artificial Sequence: Synthetic oligonucleotide
  Target: ANGPTL4; (+) strand; PAM type: NRG; PAM sequence: GAG
gatcacgaggtcaggagatc

SEQ ID NO: 11459 - DNA, 20 bp, Artificial Sequence
  Description of Artificial Sequence: Synthetic oligonucleotide
  Target: ANGPTL4; (+) strand; PAM type: NRG; PAM sequence: CAG
cgaggtcaggagatcgagac

SEQ ID NO: 11460 - DNA, 20 bp, Artificial Sequence
  Description of Artificial Sequence: Synthetic oligonucleotide
  Target: ANGPTL4; (+) strand; PAM type: NRG; PAM sequence: TGG
tcaggagatcgagaccagtc

SEQ ID NO: 11461 - DNA, 20 bp, Artificial Sequence
  Description of Artificial Sequence: Synthetic oligonucleotide
  Target: ANGPTL4; (+) strand; PAM type: NRG; PAM sequence: TGG
cgagaccagtctggccaaca

SEQ ID NO: 11462 - DNA, 20 bp, Artificial Sequence
  Description of Artificial Sequence: Synthetic oligonucleotide
  Target: ANGPTL4; (+) strand; PAM type: NRG; PAM sequence: TAG
tctacaaataatgcaaaaac

SEQ ID NO: 11463 - DNA, 20 bp, Artificial Sequence
  Description of Artificial Sequence: Synthetic oligonucleotide
  Target: ANGPTL4; (+) strand; PAM type: NRG; PAM sequence: CGG
caaataatgcaaaaactagt

SEQ ID NO: 11464 - DNA, 20 bp, Artificial Sequence
  Description of Artificial Sequence: Synthetic oligonucleotide
  Target: ANGPTL4; (+) strand; PAM type: NRG; PAM sequence: GGG
aaataatgcaaaaactagtc

SEQ ID NO: 11465 - DNA, 20 bp, Artificial Sequence
  Description of Artificial Sequence: Synthetic oligonucleotide
  Target: ANGPTL4; (+) strand; PAM type: NRG; PAM sequence: TGG
atgcaaaaactagtcgggcg

SEQ ID NO: 11466 - DNA, 20 bp, Artificial Sequence
  Description of Artificial Sequence: Synthetic oligonucleotide
  Target: ANGPTL4; (+) strand; PAM type: NRG; PAM sequence: TGG
caaaaactagtcgggcgtgg

SEQ ID NO: 11467 - DNA, 20 bp, Artificial Sequence
  Description of Artificial Sequence: Synthetic oligonucleotide
  Target: ANGPTL4; (+) strand; PAM type: NRG; PAM sequence: TAG
ggcgtggtggcacatgcctg

SEQ ID NO: 11468 - DNA, 20 bp, Artificial Sequence
  Description of Artificial Sequence: Synthetic oligonucleotide
  Target: ANGPTL4; (+) strand; PAM type: NRG; PAM sequence: CAG
gtggcacatgcctgtagtcc

SEQ ID NO: 11469 - DNA, 20 bp, Artificial Sequence
  Description of Artificial Sequence: Synthetic oligonucleotide
  Target: ANGPTL4; (+) strand; PAM type: NRG; PAM sequence: CGG
gcctgtagtcccagctgctc

SEQ ID NO: 11470 - DNA, 20 bp, Artificial Sequence
  Description of Artificial Sequence: Synthetic oligonucleotide
  Target: ANGPTL4; (+) strand; PAM type: NRG; PAM sequence: GAG
ctgtagtcccagctgctccg

SEQ ID NO: 11471 - DNA, 20 bp, Artificial Sequence
  Description of Artificial Sequence: Synthetic oligonucleotide
  Target: ANGPTL4; (+) strand; PAM type: NRG; PAM sequence: AGG
tgtagtcccagctgctccgg

SEQ ID NO: 11472 - DNA, 20 bp, Artificial Sequence
  Description of Artificial Sequence: Synthetic oligonucleotide
  Target: ANGPTL4; (+) strand; PAM type: NRG; PAM sequence: CGG
cccagctgctccggaggctg

SEQ ID NO: 11473 - DNA, 20 bp, Artificial Sequence
  Description of Artificial Sequence: Synthetic oligonucleotide
  Target: ANGPTL4; (+) strand; PAM type: NRG; PAM sequence: CAG
agctgctccggaggctgcgg

SEQ ID NO: 11474 - DNA, 20 bp, Artificial Sequence
  Description of Artificial Sequence: Synthetic oligonucleotide
  Target: ANGPTL4; (+) strand; PAM type: NRG; PAM sequence: TGG
gcggcagaattgcttgaacc

SEQ ID NO: 11475 - DNA, 20 bp, Artificial Sequence
  Description of Artificial Sequence: Synthetic oligonucleotide
  Target: ANGPTL4; (+) strand; PAM type: NRG; PAM sequence: GGG
cggcagaattgcttgaacct

SEQ ID NO: 11476 - DNA, 20 bp, Artificial Sequence
  Description of Artificial Sequence: Synthetic oligonucleotide
  Target: ANGPTL4; (+) strand; PAM type: NRG; PAM sequence: GAG
gcagaattgcttgaacctgg

SEQ ID NO: 11477 - DNA, 20 bp, Artificial Sequence
  Description of Artificial Sequence: Synthetic oligonucleotide
  Target: ANGPTL4; (+) strand; PAM type: NRG; PAM sequence: AGG
cagaattgcttgaacctggg

SEQ ID NO: 11478 - DNA, 20 bp, Artificial Sequence
  Description of Artificial Sequence: Synthetic oligonucleotide
  Target: ANGPTL4; (+) strand; PAM type: NRG; PAM sequence: CGG
aattgcttgaacctgggagg

SEQ ID NO: 11479 - DNA, 20 bp, Artificial Sequence
  Description of Artificial Sequence: Synthetic oligonucleotide
  Target: ANGPTL4; (+) strand; PAM type: NRG; PAM sequence: GAG
ttgcttgaacctgggaggcg

SEQ ID NO: 11480 - DNA, 20 bp, Artificial Sequence
  Description of Artificial Sequence: Synthetic oligonucleotide
  Target: ANGPTL4; (+) strand; PAM type: NRG; PAM sequence: AGG
tgcttgaacctgggaggcgg

SEQ ID NO: 11481 - DNA, 20 bp, Artificial Sequence
  Description of Artificial Sequence: Synthetic oligonucleotide
  Target: ANGPTL4; (+) strand; PAM type: NRG; PAM sequence: CAG
aacctgggaggcggaggttg

SEQ ID NO: 11482 - DNA, 20 bp, Artificial Sequence
  Description of Artificial Sequence: Synthetic oligonucleotide
  Target: ANGPTL4; (+) strand; PAM type: NRG; PAM sequence: GAG
tgggaggcggaggttgcagt

SEQ ID NO: 11483 - DNA, 20 bp, Artificial Sequence
  Description of Artificial Sequence: Synthetic oligonucleotide
  Target: ANGPTL4; (+) strand; PAM type: NRG; PAM sequence: AAG
ggcggaggttgcagtgagcc

SEQ ID NO: 11484 - DNA, 20 bp, Artificial Sequence
  Description of Artificial Sequence: Synthetic oligonucleotide
  Target: ANGPTL4; (+) strand; PAM type: NRG; PAM sequence: CAG
aagattgcgccactgcactc

SEQ ID NO: 11485 - DNA, 20 bp, Artificial Sequence
  Description of Artificial Sequence: Synthetic oligonucleotide
  Target: ANGPTL4; (+) strand; PAM type: NRG; PAM sequence: TGG
tgcgccactgcactccagcc

SEQ ID NO: 11486 - DNA, 20 bp, Artificial Sequence
  Description of Artificial Sequence: Synthetic oligonucleotide
  Target: ANGPTL4; (+) strand; PAM type: NRG; PAM sequence: CAG
actgcactccagcctggcga

SEQ ID NO: 11487 - DNA, 20 bp, Artificial Sequence
  Description of Artificial Sequence: Synthetic oligonucleotide
  Target: ANGPTL4; (+) strand; PAM type: NRG; PAM sequence: GAG
tgcactccagcctggcgaca

SEQ ID NO: 11488 - DNA, 20 bp, Artificial Sequence
  Description of Artificial Sequence: Synthetic oligonucleotide
  Target: ANGPTL4; (+) strand; PAM type: NRG; PAM sequence: GAG
ctccagcctggcgacagagc

SEQ ID NO: 11489 - DNA, 20 bp, Artificial Sequence
  Description of Artificial Sequence: Synthetic oligonucleotide
  Target: ANGPTL4; (+) strand; PAM type: NRG; PAM sequence: AAG
atcaaaaaacaaaacaaaaa

SEQ ID NO: 11490 - DNA, 20 bp, Artificial Sequence
  Description of Artificial Sequence: Synthetic oligonucleotide
  Target: ANGPTL4; (+) strand; PAM type: NRG; PAM sequence: GAG
caaaaaacaaaacaaaaaaa

SEQ ID NO: 11491 - DNA, 20 bp, Artificial Sequence
  Description of Artificial Sequence: Synthetic oligonucleotide
  Target: ANGPTL4; (+) strand; PAM type: NRG; PAM sequence: GAG
aaaaacaaaacaaaaaaaga

SEQ ID NO: 11492 - DNA, 20 bp, Artificial Sequence
  Description of Artificial Sequence: Synthetic oligonucleotide
  Target: ANGPTL4; (+) strand; PAM type: NRG; PAM sequence: CAG
aaaacaaaaaaagagagtcc

SEQ ID NO: 11493 - DNA, 20 bp, Artificial Sequence
  Description of Artificial Sequence: Synthetic oligonucleotide
  Target: ANGPTL4; (+) strand; PAM type: NRG; PAM sequence: AGG
aaacaaaaaaagagagtccc

SEQ ID NO: 11494 - DNA, 20 bp, Artificial Sequence
  Description of Artificial Sequence: Synthetic oligonucleotide
  Target: ANGPTL4; (+) strand; PAM type: NRG; PAM sequence: CAG
caaaaaaagagagtcccagg

SEQ ID NO: 11495 - DNA, 20 bp, Artificial Sequence
  Description of Artificial Sequence: Synthetic oligonucleotide
  Target: ANGPTL4; (+) strand; PAM type: NRG; PAM sequence: AGG
aaaaaaagagagtcccaggc

SEQ ID NO: 11496 - DNA, 20 bp, Artificial Sequence
  Description of Artificial Sequence: Synthetic oligonucleotide
  Target: ANGPTL4; (+) strand; PAM type: NRG; PAM sequence: GGG
aaaaaagagagtcccaggca

SEQ ID NO: 11497 - DNA, 20 bp, Artificial Sequence
  Description of Artificial Sequence: Synthetic oligonucleotide
  Target: ANGPTL4; (+) strand; PAM type: NRG; PAM sequence: GGG
aaaaagagagtcccaggcag

SEQ ID NO: 11498 - DNA, 20 bp, Artificial Sequence
  Description of Artificial Sequence: Synthetic oligonucleotide
  Target: ANGPTL4; (+) strand; PAM type: NRG; PAM sequence: GGG
aaaagagagtcccaggcagg

SEQ ID NO: 11499 - DNA, 20 bp, Artificial Sequence
  Description of Artificial Sequence: Synthetic oligonucleotide
  Target: ANGPTL4; (+) strand; PAM type: NRG; PAM sequence: CAG
agagtcccaggcagggggaa

SEQ ID NO: 11500 - DNA, 20 bp, Artificial Sequence
  Description of Artificial Sequence: Synthetic oligonucleotide
  Target: ANGPTL4; (+) strand; PAM type: NRG; PAM sequence: AAG
cagggggaacagcatgtgca

SEQ ID NO: 11501 - DNA, 20 bp, Artificial Sequence
  Description of Artificial Sequence: Synthetic oligonucleotide
  Target: ANGPTL4; (+) strand; PAM type: NRG; PAM sequence: TGG
cagcatgtgcaaagtccctg

SEQ ID NO: 11502 - DNA, 20 bp, Artificial Sequence
  Description of Artificial Sequence: Synthetic oligonucleotide
  Target: ANGPTL4; (+) strand; PAM type: NRG; PAM sequence: CAG
catgtgcaaagtccctgtgg

SEQ ID NO: 11503 - DNA, 20 bp, Artificial Sequence
  Description of Artificial Sequence: Synthetic oligonucleotide
  Target: ANGPTL4; (+) strand; PAM type: NRG; PAM sequence: AGG
atgtgcaaagtccctgtggc

SEQ ID NO: 11504 - DNA, 20 bp, Artificial Sequence
  Description of Artificial Sequence: Synthetic oligonucleotide
  Target: ANGPTL4; (+) strand; PAM type: NRG; PAM sequence: CGG
gcaaagtccctgtggcagga

SEQ ID NO: 11505 - DNA, 20 bp, Artificial Sequence
  Description of Artificial Sequence: Synthetic oligonucleotide
  Target: ANGPTL4; (+) strand; PAM type: NRG; PAM sequence: TGG
ccctgtggcaggacggtgtg

SEQ ID NO: 11506 - DNA, 20 bp, Artificial Sequence
  Description of Artificial Sequence: Synthetic oligonucleotide
  Target: ANGPTL4; (+) strand; PAM type: NRG; PAM sequence: AAG
ggcaggacggtgtgtggtac

SEQ ID NO: 11507 - DNA, 20 bp, Artificial Sequence
  Description of Artificial Sequence: Synthetic oligonucleotide
  Target: ANGPTL4; (+) strand; PAM type: NRG; PAM sequence: AGG
gcaggacggtgtgtggtaca

SEQ ID NO: 11508 - DNA, 20 bp, Artificial Sequence
  Description of Artificial Sequence: Synthetic oligonucleotide
  Target: ANGPTL4; (+) strand; PAM type: NRG; PAM sequence: GGG
caggacggtgtgtggtacaa

SEQ ID NO: 11509 - DNA, 20 bp, Artificial Sequence
  Description of Artificial Sequence: Synthetic oligonucleotide
  Target: ANGPTL4; (+) strand; PAM type: NRG; PAM sequence: TGG
gacggtgtgtggtacaaggg

SEQ ID NO: 11510 - DNA, 20 bp, Artificial Sequence
  Description of Artificial Sequence: Synthetic oligonucleotide
  Target: ANGPTL4; (+) strand; PAM type: NRG; PAM sequence: GGG
acggtgtgtggtacaagggt

SEQ ID NO: 11511 - DNA, 20 bp, Artificial Sequence
  Description of Artificial Sequence: Synthetic oligonucleotide
  Target: ANGPTL4; (+) strand; PAM type: NRG; PAM sequence: AAG
gtgtgtggtacaagggtggg

SEQ ID NO: 11512 - DNA, 20 bp, Artificial Sequence
  Description of Artificial Sequence: Synthetic oligonucleotide
  Target: ANGPTL4; (+) strand; PAM type: NRG; PAM sequence: AAG
gtggtacaagggtgggaaga

SEQ ID NO: 11513 - DNA, 20 bp, Artificial Sequence
  Description of Artificial Sequence: Synthetic oligonucleotide
  Target: ANGPTL4; (+) strand; PAM type: NRG; PAM sequence: CAG
tgggaagaaagcctgtgtgc

SEQ ID NO: 11514 - DNA, 20 bp, Artificial Sequence
  Description of Artificial Sequence: Synthetic oligonucleotide
  Target: ANGPTL4; (+) strand; PAM type: NRG; PAM sequence: GAG
ggaagaaagcctgtgtgcca

SEQ ID NO: 11515 - DNA, 20 bp, Artificial Sequence
  Description of Artificial Sequence: Synthetic oligonucleotide
  Target: ANGPTL4; (+) strand; PAM type: NRG; PAM sequence: GAG
aagaaagcctgtgtgccaga

SEQ ID NO: 11516 - DNA, 20 bp, Artificial Sequence
  Description of Artificial Sequence: Synthetic oligonucleotide
  Target: ANGPTL4; (+) strand; PAM type: NRG; PAM sequence: AGG
agaaagcctgtgtgccagag

SEQ ID NO: 11517 - DNA, 20 bp, Artificial Sequence
  Description of Artificial Sequence: Synthetic oligonucleotide
  Target: ANGPTL4; (+) strand; PAM type: NRG; PAM sequence: GGG
gaaagcctgtgtgccagaga

SEQ ID NO: 11518 - DNA, 20 bp, Artificial Sequence
  Description of Artificial Sequence: Synthetic oligonucleotide
  Target: ANGPTL4; (+) strand; PAM type: NRG; PAM sequence: TGG
cctgtgtgccagagagggtg

SEQ ID NO: 11519 - DNA, 20 bp, Artificial Sequence
  Description of Artificial Sequence: Synthetic oligonucleotide
  Target: ANGPTL4; (+) strand; PAM type: NRG; PAM sequence: GGG
ctgtgtgccagagagggtgt

SEQ ID NO: 11520 - DNA, 20 bp, Artificial Sequence
  Description of Artificial Sequence: Synthetic oligonucleotide
  Target: ANGPTL4; (+) strand; PAM type: NRG; PAM sequence: CAG
tgccagagagggtgtgggta

SEQ ID NO: 11521 - DNA, 20 bp, Artificial Sequence
  Description of Artificial Sequence: Synthetic oligonucleotide
  Target: ANGPTL4; (+) strand; PAM type: NRG; PAM sequence: TGG
gagagggtgtgggtacagca

SEQ ID NO: 11522 - DNA, 20 bp, Artificial Sequence
  Description of Artificial Sequence: Synthetic oligonucleotide
  Target: ANGPTL4; (+) strand; PAM type: NRG; PAM sequence: CAG
agggtgtgggtacagcatgg

SEQ ID NO: 11523 - DNA, 20 bp, Artificial Sequence
  Description of Artificial Sequence: Synthetic oligonucleotide
  Target: ANGPTL4; (+) strand; PAM type: NRG; PAM sequence: AGG
gggtgtgggtacagcatggc

SEQ ID NO: 11524 - DNA, 20 bp, Artificial Sequence
  Description of Artificial Sequence: Synthetic oligonucleotide
  Target: ANGPTL4; (+) strand; PAM type: NRG; PAM sequence: GAG
gtgtgggtacagcatggcag

SEQ ID NO: 11525 - DNA, 20 bp, Artificial Sequence
  Description of Artificial Sequence: Synthetic oligonucleotide
  Target: ANGPTL4; (+) strand; PAM type: NRG; PAM sequence: AGG
tgtgggtacagcatggcagg

SEQ ID NO: 11526 - DNA, 20 bp, Artificial Sequence
  Description of Artificial Sequence: Synthetic oligonucleotide
  Target: ANGPTL4; (+) strand; PAM type: NRG; PAM sequence: GAG
tgggtacagcatggcaggag

SEQ ID NO: 11527 - DNA, 20 bp, Artificial Sequence
  Description of Artificial Sequence: Synthetic oligonucleotide
  Target: ANGPTL4; (+) strand; PAM type: NRG; PAM sequence: AGG
gggtacagcatggcaggagg

SEQ ID NO: 11528 - DNA, 20 bp, Artificial Sequence
  Description of Artificial Sequence: Synthetic oligonucleotide
  Target: ANGPTL4; (+) strand; PAM type: NRG; PAM sequence: TGG
acagcatggcaggaggagga

SEQ ID NO: 11529 - DNA, 20 bp, Artificial Sequence
  Description of Artificial Sequence: Synthetic oligonucleotide
  Target: ANGPTL4; (+) strand; PAM type: NRG; PAM sequence: GGG
cagcatggcaggaggaggat

SEQ ID NO: 11530 - DNA, 20 bp, Artificial Sequence
  Description of Artificial Sequence: Synthetic oligonucleotide
  Target: ANGPTL4; (+) strand; PAM type: NRG; PAM sequence: CGG
tggcaggaggaggatgggca

SEQ ID NO: 11531 - DNA, 20 bp, Artificial Sequence
  Description of Artificial Sequence: Synthetic oligonucleotide
  Target: ANGPTL4; (+) strand; PAM type: NRG; PAM sequence: GGG
ggcaggaggaggatgggcac

SEQ ID NO: 11532 - DNA, 20 bp, Artificial Sequence
  Description of Artificial Sequence: Synthetic oligonucleotide
  Target: ANGPTL4; (+) strand; PAM type: NRG; PAM sequence: GGG
gcaggaggaggatgggcacg

SEQ ID NO: 11533 - DNA, 20 bp, Artificial Sequence
  Description of Artificial Sequence: Synthetic oligonucleotide
  Target: ANGPTL4; (+) strand; PAM type: NRG; PAM sequence: GGG
caggaggaggatgggcacgg

SEQ ID NO: 11534 - DNA, 20 bp, Artificial Sequence
  Description of Artificial Sequence: Synthetic oligonucleotide
  Target: ANGPTL4; (+) strand; PAM type: NRG; PAM sequence: TGG
aggaggatgggcacgggggc

SEQ ID NO: 11535 - DNA, 20 bp, Artificial Sequence
  Description of Artificial Sequence: Synthetic oligonucleotide
  Target: ANGPTL4; (+) strand; PAM type: NRG; PAM sequence: CAG
gggcacgggggctggtcctc

SEQ ID NO: 11536 - DNA, 20 bp, Artificial Sequence
  Description of Artificial Sequence: Synthetic oligonucleotide
  Target: ANGPTL4; (+) strand; PAM type: NRG; PAM sequence: AGG
ggcacgggggctggtcctcc

SEQ ID NO: 11537 - DNA, 20 bp, Artificial Sequence
  Description of Artificial Sequence: Synthetic oligonucleotide
  Target: ANGPTL4; (+) strand; PAM type: NRG; PAM sequence: TGG
ctggtcctccaggtgccttg

SEQ ID NO: 11538 - DNA, 20 bp, Artificial Sequence
  Description of Artificial Sequence: Synthetic oligonucleotide
  Target: ANGPTL4; (+) strand; PAM type: NRG; PAM sequence: GAG
ggtgccttgtggaccatgct

SEQ ID NO: 11539 - DNA, 20 bp, Artificial Sequence
  Description of Artificial Sequence: Synthetic oligonucleotide
  Target: ANGPTL4; (+) strand; PAM type: NRG; PAM sequence: AGG
gtgccttgtggaccatgctg

SEQ ID NO: 11540 - DNA, 20 bp, Artificial Sequence
  Description of Artificial Sequence: Synthetic oligonucleotide
  Target: ANGPTL4; (+) strand; PAM type: NRG; PAM sequence: AAG
ccttgtggaccatgctgagg

SEQ ID NO: 11541 - DNA, 20 bp, Artificial Sequence
  Description of Artificial Sequence: Synthetic oligonucleotide
  Target: ANGPTL4; (+) strand; PAM type: NRG; PAM sequence: AGG
cttgtggaccatgctgagga

SEQ ID NO: 11542 - DNA, 20 bp, Artificial Sequence
  Description of Artificial Sequence: Synthetic oligonucleotide
  Target: ANGPTL4; (+) strand; PAM type: NRG; PAM sequence: TAG
gaccatgctgaggaaggaca

SEQ ID NO: 11543 - DNA, 20 bp, Artificial Sequence
  Description of Artificial Sequence: Synthetic oligonucleotide
  Target: ANGPTL4; (+) strand; PAM type: NRG; PAM sequence: AGG
accatgctgaggaaggacat

SEQ ID NO: 11544 - DNA, 20 bp, Artificial Sequence
  Description of Artificial Sequence: Synthetic oligonucleotide
  Target: ANGPTL4; (+) strand; PAM type: NRG; PAM sequence: GGG
ccatgctgaggaaggacata

SEQ ID NO: 11545 - DNA, 20 bp, Artificial Sequence
  Description of Artificial Sequence: Synthetic oligonucleotide
  Target: ANGPTL4; (+) strand; PAM type: NRG; PAM sequence: GAG
atgctgaggaaggacatagg

SEQ ID NO: 11546 - DNA, 20 bp, Artificial Sequence
  Description of Artificial Sequence: Synthetic oligonucleotide
  Target: ANGPTL4; (+) strand; PAM type: NRG; PAM sequence: TGG
aggaaggacatagggagcca

SEQ ID NO: 11547 - DNA, 20 bp, Artificial Sequence
  Description of Artificial Sequence: Synthetic oligonucleotide
  Target: ANGPTL4; (+) strand; PAM type: NRG; PAM sequence: AAG
aaggacatagggagccatgg

SEQ ID NO: 11548 - DNA, 20 bp, Artificial Sequence
  Description of Artificial Sequence: Synthetic oligonucleotide
  Target: ANGPTL4; (+) strand; PAM type: NRG; PAM sequence: GAG
ggacatagggagccatggaa

SEQ ID NO: 11549 - DNA, 20 bp, Artificial Sequence
  Description of Artificial Sequence: Synthetic oligonucleotide
  Target: ANGPTL4; (+) strand; PAM type: NRG; PAM sequence: AGG
gacatagggagccatggaag

SEQ ID NO: 11550 - DNA, 20 bp, Artificial Sequence
  Description of Artificial Sequence: Synthetic oligonucleotide
  Target: ANGPTL4; (+) strand; PAM type: NRG; PAM sequence: TAG
tagggagccatggaagaggt

SEQ ID NO: 11551 - DNA, 20 bp, Artificial Sequence
  Description of Artificial Sequence: Synthetic oligonucleotide
  Target: ANGPTL4; (+) strand; PAM type: NRG; PAM sequence: AGG
agggagccatggaagaggtt

SEQ ID NO: 11552 - DNA, 20 bp, Artificial Sequence
  Description of Artificial Sequence: Synthetic oligonucleotide
  Target: ANGPTL4; (+) strand; PAM type: NRG; PAM sequence: CAG
gagccatggaagaggttagg

SEQ ID NO: 11553 - DNA, 20 bp, Artificial Sequence
  Description of Artificial Sequence: Synthetic oligonucleotide
  Target: ANGPTL4; (+) strand; PAM type: NRG; PAM sequence: TGG
catggaagaggttaggcaga

SEQ ID NO: 11554 - DNA, 20 bp, Artificial Sequence
  Description of Artificial Sequence: Synthetic oligonucleotide
  Target: ANGPTL4; (+) strand; PAM type: NRG; PAM sequence: CAG
ggaagaggttaggcagatgg

SEQ ID NO: 11555 - DNA, 20 bp, Artificial Sequence
  Description of Artificial Sequence: Synthetic oligonucleotide
  Target: ANGPTL4; (+) strand; PAM type: NRG; PAM sequence: GAG
aagaggttaggcagatggca

SEQ ID NO: 11556 - DNA, 20 bp, Artificial Sequence
  Description of Artificial Sequence: Synthetic oligonucleotide
  Target: ANGPTL4; (+) strand; PAM type: NRG; PAM sequence: GAG
gaggttaggcagatggcaga

SEQ ID NO: 11557 - DNA, 20 bp, Artificial Sequence
  Description of Artificial Sequence: Synthetic oligonucleotide
  Target: ANGPTL4; (+) strand; PAM type: NRG; PAM sequence: AGG
aggttaggcagatggcagag

SEQ ID NO: 11558 - DNA, 20 bp, Artificial Sequence
  Description of Artificial Sequence: Synthetic oligonucleotide
  Target: ANGPTL4; (+) strand; PAM type: NRG; PAM sequence: TGG
ttaggcagatggcagagagg

SEQ ID NO: 11559 - DNA, 20 bp, Artificial Sequence
  Description of Artificial Sequence: Synthetic oligonucleotide
  Target: ANGPTL4; (+) strand; PAM type: NRG; PAM sequence: GAG
gatggcagagaggtggtcat

SEQ ID NO: 11560 - DNA, 20 bp, Artificial Sequence
  Description of Artificial Sequence: Synthetic oligonucleotide
  Target: ANGPTL4; (+) strand; PAM type: NRG; PAM sequence: AAG
cagagaggtggtcatgagat

SEQ ID NO: 11561 - DNA, 20 bp, Artificial Sequence
  Description of Artificial Sequence: Synthetic oligonucleotide
  Target: ANGPTL4; (+) strand; PAM type: NRG; PAM sequence: TGG
agatttgccttttacttccc

SEQ ID NO: 11562 - DNA, 20 bp, Artificial Sequence
  Description of Artificial Sequence: Synthetic oligonucleotide
  Target: ANGPTL4; (+) strand; PAM type: NRG; PAM sequence: AAG
ttccctggtcatccactgtt

SEQ ID NO: 11563 - DNA, 20 bp, Artificial Sequence
  Description of Artificial Sequence: Synthetic oligonucleotide
  Target: ANGPTL4; (+) strand; PAM type: NRG; PAM sequence: CAG
gtcatccactgttaagcccc

SEQ ID NO: 11564 - DNA, 20 bp, Artificial Sequence
  Description of Artificial Sequence: Synthetic oligonucleotide
  Target: ANGPTL4; (+) strand; PAM type: NRG; PAM sequence: TGG
gttaagcccccagatatgcc

SEQ ID NO: 11565 - DNA, 20 bp, Artificial Sequence
  Description of Artificial Sequence: Synthetic oligonucleotide
  Target: ANGPTL4; (+) strand; PAM type: NRG; PAM sequence: GAG
cccagatatgcctggctcct

SEQ ID NO: 11566 - DNA, 20 bp, Artificial Sequence
  Description of Artificial Sequence: Synthetic oligonucleotide
  Target: ANGPTL4; (+) strand; PAM type: NRG; PAM sequence: CAG
ctggctcctgagaccccccc

SEQ ID NO: 11567 - DNA, 20 bp, Artificial Sequence
  Description of Artificial Sequence: Synthetic oligonucleotide
  Target: ANGPTL4; (+) strand; PAM type: NRG; PAM sequence: AGG
tggctcctgagacccccccc

SEQ ID NO: 11568 - DNA, 20 bp, Artificial Sequence
  Description of Artificial Sequence: Synthetic oligonucleotide
  Target: ANGPTL4; (+) strand; PAM type: NRG; PAM sequence: GGG
ggctcctgagacccccccca

SEQ ID NO: 11569 - DNA, 20 bp, Artificial Sequence
  Description of Artificial Sequence: Synthetic oligonucleotide
  Target: ANGPTL4; (+) strand; PAM type: NRG; PAM sequence: GGG
gctcctgagaccccccccag

SEQ ID NO: 11570 - DNA, 20 bp, Artificial Sequence
  Description of Artificial Sequence: Synthetic oligonucleotide
  Target: ANGPTL4; (+) strand; PAM type: NRG; PAM sequence: AAG
aggggctgccctcctgtttc

SEQ ID NO: 11571 - DNA, 20 bp, Artificial Sequence
  Description of Artificial Sequence: Synthetic oligonucleotide
  Target: ANGPTL4; (+) strand; PAM type: NRG; PAM sequence: CAG
gtctccactttatctccctt

SEQ ID NO: 11572 - DNA, 20 bp, Artificial Sequence
  Description of Artificial Sequence: Synthetic oligonucleotide
  Target: ANGPTL4; (+) strand; PAM type: NRG; PAM sequence: AGG
tctccactttatctcccttc

SEQ ID NO: 11573 - DNA, 20 bp, Artificial Sequence
  Description of Artificial Sequence: Synthetic oligonucleotide
  Target: ANGPTL4; (+) strand; PAM type: NRG; PAM sequence: GGG
ctccactttatctcccttca

SEQ ID NO: 11574 - DNA, 20 bp, Artificial Sequence
  Description of Artificial Sequence: Synthetic oligonucleotide
  Target: ANGPTL4; (+) strand; PAM type: NRG; PAM sequence: CAG
tatctcccttcagggctgcc

SEQ ID NO: 11575 - DNA, 20 bp, Artificial Sequence
  Description of Artificial Sequence: Synthetic oligonucleotide
  Target: ANGPTL4; (+) strand; PAM type: NRG; PAM sequence: AGG
atctcccttcagggctgccc

SEQ ID NO: 11576 - DNA, 20 bp, Artificial Sequence
  Description of Artificial Sequence: Synthetic oligonucleotide
  Target: ANGPTL4; (+) strand; PAM type: NRG; PAM sequence: GGG
tctcccttcagggctgccca

SEQ ID NO: 11577 - DNA, 20 bp, Artificial Sequence
  Description of Artificial Sequence: Synthetic oligonucleotide
  Target: ANGPTL4; (+) strand; PAM type: NRG; PAM sequence: CAG
cagggctgcccagggattgc

SEQ ID NO: 11578 - DNA, 20 bp, Artificial Sequence
  Description of Artificial Sequence: Synthetic oligonucleotide
  Target: ANGPTL4; (+) strand; PAM type: NRG; PAM sequence: AGG
agggctgcccagggattgcc

SEQ ID NO: 11579 - DNA, 20 bp, Artificial Sequence
  Description of Artificial Sequence: Synthetic oligonucleotide
  Target: ANGPTL4; (+) strand; PAM type: NRG; PAM sequence: GAG
ggctgcccagggattgccag

SEQ ID NO: 11580 - DNA, 20 bp, Artificial Sequence
  Description of Artificial Sequence: Synthetic oligonucleotide
  Target: ANGPTL4; (+) strand; PAM type: NRG; PAM sequence: CAG
gggattgccaggagctgttc

SEQ ID NO: 11581 - DNA, 20 bp, Artificial Sequence
  Description of Artificial Sequence: Synthetic oligonucleotide
  Target: ANGPTL4; (+) strand; PAM type: NRG; PAM sequence: AGG
ggattgccaggagctgttcc

SEQ ID NO: 11582 - DNA, 20 bp, Artificial Sequence
  Description of Artificial Sequence: Synthetic oligonucleotide
  Target: ANGPTL4; (+) strand; PAM type: NRG; PAM sequence: TGG
tgccaggagctgttccaggt

SEQ ID NO: 11583 - DNA, 20 bp, Artificial Sequence
  Description of Artificial Sequence: Synthetic oligonucleotide
  Target: ANGPTL4; (+) strand; PAM type: NRG; PAM sequence: GGG
gccaggagctgttccaggtt

SEQ ID NO: 11584 - DNA, 20 bp, Artificial Sequence
  Description of Artificial Sequence: Synthetic oligonucleotide
  Target: ANGPTL4; (+) strand; PAM type: NRG; PAM sequence: GGG
ccaggagctgttccaggttg

SEQ ID NO: 11585 - DNA, 20 bp, Artificial Sequence
  Description of Artificial Sequence: Synthetic oligonucleotide
  Target: ANGPTL4; (+) strand; PAM type: NRG; PAM sequence: GAG
aggagctgttccaggttggg

SEQ ID NO: 11586 - DNA, 20 bp, Artificial Sequence
  Description of Artificial Sequence: Synthetic oligonucleotide
  Target: ANGPTL4; (+) strand; PAM type: NRG; PAM sequence: GAG
gagctgttccaggttgggga

SEQ ID NO: 11587 - DNA, 20 bp, Artificial Sequence
  Description of Artificial Sequence: Synthetic oligonucleotide
  Target: ANGPTL4; (+) strand; PAM type: NRG; PAM sequence: AGG
agctgttccaggttggggag

SEQ ID NO: 11588 - DNA, 20 bp, Artificial Sequence
  Description of Artificial Sequence: Synthetic oligonucleotide
  Target: ANGPTL4; (+) strand; PAM type: NRG; PAM sequence: CAG
tgttccaggttggggagagg

SEQ ID NO: 11589 - DNA, 20 bp, Artificial Sequence
  Description of Artificial Sequence: Synthetic oligonucleotide
  Target: ANGPTL4; (+) strand; PAM type: NRG; PAM sequence: GAG
ttccaggttggggagaggca

SEQ ID NO: 11590 - DNA, 20 bp, Artificial Sequence
  Description of Artificial Sequence: Synthetic oligonucleotide
  Target: ANGPTL4; (+) strand; PAM type: NRG; PAM sequence: TGG
caggttggggagaggcagag

SEQ ID NO: 11591 - DNA, 20 bp, Artificial Sequence
  Description of Artificial Sequence: Synthetic oligonucleotide
  Target: ANGPTL4; (+) strand; PAM type: NRG; PAM sequence: CAG
agagtggactatttgaaatc

SEQ ID NO: 11592 - DNA, 20 bp, Artificial Sequence
  Description of Artificial Sequence: Synthetic oligonucleotide
  Target: ANGPTL4; (+) strand; PAM type: NRG; PAM sequence: CAG
gactatttgaaatccagcct

SEQ ID NO: 11593 - DNA, 20 bp, Artificial Sequence
  Description of Artificial Sequence: Synthetic oligonucleotide
  Target: ANGPTL4; (+) strand; PAM type: NRG; PAM sequence: AGG
actatttgaaatccagcctc

SEQ ID NO: 11594 - DNA, 20 bp, Artificial Sequence
  Description of Artificial Sequence: Synthetic oligonucleotide
  Target: ANGPTL4; (+) strand; PAM type: NRG; PAM sequence: GGG
ctatttgaaatccagcctca

SEQ ID NO: 11595 - DNA, 20 bp, Artificial Sequence
  Description of Artificial Sequence: Synthetic oligonucleotide
  Target: ANGPTL4; (+) strand; PAM type: NRG; PAM sequence: GGG
tatttgaaatccagcctcag

SEQ ID NO: 11596 - DNA, 20 bp, Artificial Sequence
  Description of Artificial Sequence: Synthetic oligonucleotide
  Target: ANGPTL4; (+) strand; PAM type: NRG; PAM sequence: TGG
tcaggggtctccgccatttt

SEQ ID NO: 11597 - DNA, 20 bp, Artificial Sequence
  Description of Artificial Sequence: Synthetic oligonucleotide
  Target: ANGPTL4; (+) strand; PAM type: NRG; PAM sequence: AAG
cgccatttttggtgaactgc

SEQ ID NO: 11598 - DNA, 20 bp, Artificial Sequence
  Description of Artificial Sequence: Synthetic oligonucleotide
  Target: ANGPTL4; (+) strand; PAM type: NRG; PAM sequence: CAG
ggtgaactgcaagatgacct

SEQ ID NO: 11599 - DNA, 20 bp, Artificial Sequence
  Description of Artificial Sequence: Synthetic oligonucleotide
  Target: ANGPTL4; (+) strand; PAM type: NRG; PAM sequence: AGG
gtgaactgcaagatgacctc

SEQ ID NO: 11600 - DNA, 20 bp, Artificial Sequence
  Description of Artificial Sequence: Synthetic oligonucleotide
  Target: ANGPTL4; (+) strand; PAM type: NRG; PAM sequence: TAG
aactgcaagatgacctcagg

SEQ ID NO: 11601 - DNA, 20 bp, Artificial Sequence
  Description of Artificial Sequence: Synthetic oligonucleotide
  Target: ANGPTL4; (+) strand; PAM type: NRG; PAM sequence: AGG
actgcaagatgacctcaggt

SEQ ID NO: 11602 - DNA, 20 bp, Artificial Sequence
  Description of Artificial Sequence: Synthetic oligonucleotide
  Target: ANGPTL4; (+) strand; PAM type: NRG; PAM sequence: GGG
ctgcaagatgacctcaggta

SEQ ID NO: 11603 - DNA, 20 bp, Artificial Sequence
  Description of Artificial Sequence: Synthetic oligonucleotide
  Target: ANGPTL4; (+) strand; PAM type: NRG; PAM sequence: TAG
tgacctcaggtagggtgtgt

SEQ ID NO: 11604 - DNA, 20 bp, Artificial Sequence
  Description of Artificial Sequence: Synthetic oligonucleotide
  Target: ANGPTL4; (+) strand; PAM type: NRG; PAM sequence: CAG
ggtagggtgtgttagtccac

SEQ ID NO: 11605 - DNA, 20 bp, Artificial Sequence
  Description of Artificial Sequence: Synthetic oligonucleotide
  Target: ANGPTL4; (+) strand; PAM type: NRG; PAM sequence: AGG
gtagggtgtgttagtccacc

SEQ ID NO: 11606 - DNA, 20 bp, Artificial Sequence
  Description of Artificial Sequence: Synthetic oligonucleotide
  Target: ANGPTL4; (+) strand; PAM type: NRG; PAM sequence: GGG
tagggtgtgttagtccacca

SEQ ID NO: 11607 - DNA, 20 bp, Artificial Sequence
  Description of Artificial Sequence: Synthetic oligonucleotide
  Target: ANGPTL4; (+) strand; PAM type: NRG; PAM sequence: GGG
agggtgtgttagtccaccag

SEQ ID NO: 11608 - DNA, 20 bp, Artificial Sequence
  Description of Artificial Sequence: Synthetic oligonucleotide
  Target: ANGPTL4; (+) strand; PAM type: NRG; PAM sequence: TAG
accaggggcccctctcccca

SEQ ID NO: 11609 - DNA, 20 bp, Artificial Sequence
  Description of Artificial Sequence: Synthetic oligonucleotide
  Target: ANGPTL4; (+) strand; PAM type: NRG; PAM sequence: AGG
ccaggggcccctctccccat

SEQ ID NO: 11610 - DNA, 20 bp, Artificial Sequence
  Description of Artificial Sequence: Synthetic oligonucleotide
  Target: ANGPTL4; (+) strand; PAM type: NRG; PAM sequence: AAG
aaaacaaaacaaaaaaatta

SEQ ID NO: 11611 - DNA, 20 bp, Artificial Sequence
  Description of Artificial Sequence: Synthetic oligonucleotide
  Target: ANGPTL4; (+) strand; PAM type: NRG; PAM sequence: AGG
aaacaaaacaaaaaaattaa

SEQ ID NO: 11612 - DNA, 20 bp, Artificial Sequence
  Description of Artificial Sequence: Synthetic oligonucleotide
  Target: ANGPTL4; (+) strand; PAM type: NRG; PAM sequence: CAG
caaaacaaaaaaattaaagg

SEQ ID NO: 11613 - DNA, 20 bp, Artificial Sequence
  Description of Artificial Sequence: Synthetic oligonucleotide
  Target: ANGPTL4; (+) strand; PAM type: NRG; PAM sequence: AGG
aaaacaaaaaaattaaaggc

SEQ ID NO: 11614 - DNA, 20 bp, Artificial Sequence
  Description of Artificial Sequence: Synthetic oligonucleotide
  Target: ANGPTL4; (+) strand; PAM type: NRG; PAM sequence: GGG
aaacaaaaaaattaaaggca

SEQ ID NO: 11615 - DNA, 20 bp, Artificial Sequence
  Description of Artificial Sequence: Synthetic oligonucleotide
  Target: ANGPTL4; (+) strand; PAM type: NRG; PAM sequence: AAG
agggtcttgctatgttgccc

SEQ ID NO: 11616 - DNA, 20 bp, Artificial Sequence
  Description of Artificial Sequence: Synthetic oligonucleotide
  Target: ANGPTL4; (+) strand; PAM type: NRG; PAM sequence: TGG
tcttgctatgttgcccaagc

SEQ ID NO: 11617 - DNA, 20 bp, Artificial Sequence
  Description of Artificial Sequence: Synthetic oligonucleotide
  Target: ANGPTL4; (+) strand; PAM type: NRG; PAM sequence: GAG
tttttttttttttttttttt

SEQ ID NO: 11618 - DNA, 20 bp, Artificial Sequence
  Description of Artificial Sequence: Synthetic oligonucleotide
  Target: ANGPTL4; (+) strand; PAM type: NRG; PAM sequence: TGG
ttttttttttttttttgaga

SEQ ID NO: 11619 - DNA, 20 bp, Artificial Sequence
  Description of Artificial Sequence: Synthetic oligonucleotide
  Target: ANGPTL4; (+) strand; PAM type: NRG; PAM sequence: GAG
ttttttttttttttgagatg

SEQ ID NO: 11620 - DNA, 20 bp, Artificial Sequence
  Description of Artificial Sequence: Synthetic oligonucleotide
  Target: ANGPTL4; (+) strand; PAM type: NRG; PAM sequence: TGG
ttgagatggagttttgctct

SEQ ID NO: 11621 - DNA, 20 bp, Artificial Sequence
  Description of Artificial Sequence: Synthetic oligonucleotide
  Target: ANGPTL4; (+) strand; PAM type: NRG; PAM sequence: GAG
gagatggagttttgctcttg

SEQ ID NO: 11622 - DNA, 20 bp, Artificial Sequence
  Description of Artificial Sequence: Synthetic oligonucleotide
  Target: ANGPTL4; (+) strand; PAM type: NRG; PAM sequence: TGG
tggagttttgctcttggagc

SEQ ID NO: 11623 - DNA, 20 bp, Artificial Sequence
  Description of Artificial Sequence: Synthetic oligonucleotide
  Target: ANGPTL4; (+) strand; PAM type: NRG; PAM sequence: GAG
gagttttgctcttggagctg

SEQ ID NO: 11624 - DNA, 20 bp, Artificial Sequence
  Description of Artificial Sequence: Synthetic oligonucleotide
  Target: ANGPTL4; (+) strand; PAM type: NRG; PAM sequence: CAG
ggagtgcaatgccacgatct

SEQ ID NO: 11625 - DNA, 20 bp, Artificial Sequence
  Description of Artificial Sequence: Synthetic oligonucleotide
  Target: ANGPTL4; (+) strand; PAM type: NRG; PAM sequence: CGG
tcactgaaacctccgcctcc

SEQ ID NO: 11626 - DNA, 20 bp, Artificial Sequence
  Description of Artificial Sequence: Synthetic oligonucleotide
  Target: ANGPTL4; (+) strand; PAM type: NRG; PAM sequence: GGG
cactgaaacctccgcctccc

SEQ ID NO: 11627 - DNA, 20 bp, Artificial Sequence
  Description of Artificial Sequence: Synthetic oligonucleotide
  Target: ANGPTL4; (+) strand; PAM type: NRG; PAM sequence: AAG
aacctccgcctcccgggttc

SEQ ID NO: 11628 - DNA, 20 bp, Artificial Sequence
  Description of Artificial Sequence: Synthetic oligonucleotide
  Target: ANGPTL4; (+) strand; PAM type: NRG; PAM sequence: CAG
cccgggttcaagcaattctc

SEQ ID NO: 11629 - DNA, 20 bp, Artificial Sequence
  Description of Artificial Sequence: Synthetic oligonucleotide
  Target: ANGPTL4; (+) strand; PAM type: NRG; PAM sequence: CAG
ttcaagcaattctccagcgt

SEQ ID NO: 11630 - DNA, 20 bp, Artificial Sequence
  Description of Artificial Sequence: Synthetic oligonucleotide
  Target: ANGPTL4; (+) strand; PAM type: NRG; PAM sequence: CAG
ttctccagcgtcagcctccc

SEQ ID NO: 11631 - DNA, 20 bp, Artificial Sequence
  Description of Artificial Sequence: Synthetic oligonucleotide
  Target: ANGPTL4; (+) strand; PAM type: NRG; PAM sequence: TAG
tccagcgtcagcctccccag

SEQ ID NO: 11632 - DNA, 20 bp, Artificial Sequence
  Description of Artificial Sequence: Synthetic oligonucleotide
  Target: ANGPTL4; (+) strand; PAM type: NRG; PAM sequence: GAG
cgtcagcctccccagtagct

SEQ ID NO: 11633 - DNA, 20 bp, Artificial Sequence
  Description of Artificial Sequence: Synthetic oligonucleotide
  Target: ANGPTL4; (+) strand; PAM type: NRG; PAM sequence: CAG
ctccccagtagctgagacta

SEQ ID NO: 11634 - DNA, 20 bp, Artificial Sequence
  Description of Artificial Sequence: Synthetic oligonucleotide
  Target: ANGPTL4; (+) strand; PAM type: NRG; PAM sequence: AGG
tccccagtagctgagactac

SEQ ID NO: 11635 - DNA, 20 bp, Artificial Sequence
  Description of Artificial Sequence: Synthetic oligonucleotide
  Target: ANGPTL4; (+) strand; PAM type: NRG; PAM sequence: GAG
gtagctgagactacaggtgc

SEQ ID NO: 11636 - DNA, 20 bp, Artificial Sequence
  Description of Artificial Sequence: Synthetic oligonucleotide
  Target: ANGPTL4; (+) strand; PAM type: NRG; PAM sequence: CAG
caggtgcgagcaaccacacc

SEQ ID NO: 11637 - DNA, 20 bp, Artificial Sequence
  Description of Artificial Sequence: Synthetic oligonucleotide
  Target: ANGPTL4; (+) strand; PAM type: NRG; PAM sequence: TAG
ccagctaatttttgtatttt

SEQ ID NO: 11638 - DNA, 20 bp, Artificial Sequence
  Description of Artificial Sequence: Synthetic oligonucleotide
  Target: ANGPTL4; (+) strand; PAM type: NRG; PAM sequence: TAG
gctaatttttgtatttttag

SEQ ID NO: 11639 - DNA, 20 bp, Artificial Sequence
  Description of Artificial Sequence: Synthetic oligonucleotide
  Target: ANGPTL4; (+) strand; PAM type: NRG; PAM sequence: GAG
taatttttgtatttttagta

SEQ ID NO: 11640 - DNA, 20 bp, Artificial Sequence
  Description of Artificial Sequence: Synthetic oligonucleotide
  Target: ANGPTL4; (+) strand; PAM type: NRG; PAM sequence: TGG
tttgtatttttagtagagac

SEQ ID NO: 11641 - DNA, 20 bp, Artificial Sequence
  Description of Artificial Sequence: Synthetic oligonucleotide
  Target: ANGPTL4; (+) strand; PAM type: NRG; PAM sequence: GGG
ttgtatttttagtagagact

SEQ ID NO: 11642 - DNA, 20 bp, Artificial Sequence
  Description of Artificial Sequence: Synthetic oligonucleotide
  Target: ANGPTL4; (+) strand; PAM type: NRG; PAM sequence: TGG
gagactgggtttcaccatgt

SEQ ID NO: 11643 - DNA, 20 bp, Artificial Sequence
  Description of Artificial Sequence: Synthetic oligonucleotide
  Target: ANGPTL4; (+) strand; PAM type: NRG; PAM sequence: TGG
tgggtttcaccatgttggtc

SEQ ID NO: 11644 - DNA, 20 bp, Artificial Sequence
  Description of Artificial Sequence: Synthetic oligonucleotide
  Target: ANGPTL4; (+) strand; PAM type: NRG; PAM sequence: TGG
tttcaccatgttggtctggc

SEQ ID NO: 11645 - DNA, 20 bp, Artificial Sequence
  Description of Artificial Sequence: Synthetic oligonucleotide
  Target: ANGPTL4; (+) strand; PAM type: NRG; PAM sequence: TGG
ctcaaatgatttgccgactt

SEQ ID NO: 11646 - DNA, 20 bp, Artificial Sequence
  Description of Artificial Sequence: Synthetic oligonucleotide
  Target: ANGPTL4; (+) strand; PAM type: NRG; PAM sequence: TGG
actttggcctcccaaaatgc

SEQ ID NO: 11647 - DNA, 20 bp, Artificial Sequence
  Description of Artificial Sequence: Synthetic oligonucleotide
  Target: ANGPTL4; (+) strand; PAM type: NRG; PAM sequence: GGG
ctttggcctcccaaaatgct

SEQ ID NO: 11648 - DNA, 20 bp, Artificial Sequence
  Description of Artificial Sequence: Synthetic oligonucleotide
  Target: ANGPTL4; (+) strand; PAM type: NRG; PAM sequence: TAG
ctcccaaaatgctgggatta

SEQ ID NO: 11649 - DNA, 20 bp, Artificial Sequence
  Description of Artificial Sequence: Synthetic oligonucleotide
  Target: ANGPTL4; (+) strand; PAM type: NRG; PAM sequence: AGG
tcccaaaatgctgggattat

SEQ ID NO: 11650 - DNA, 20 bp, Artificial Sequence
  Description of Artificial Sequence: Synthetic oligonucleotide
  Target: ANGPTL4; (+) strand; PAM type: NRG; PAM sequence: TAG
aatgctgggattataggcat

SEQ ID NO: 11651 - DNA, 20 bp, Artificial Sequence
  Description of Artificial Sequence: Synthetic oligonucleotide
  Target: ANGPTL4; (+) strand; PAM type: NRG; PAM sequence: TGG
taggcattagccactgctcc

SEQ ID NO: 11652 - DNA, 20 bp, Artificial Sequence
  Description of Artificial Sequence: Synthetic oligonucleotide
  Target: ANGPTL4; (+) strand; PAM type: NRG; PAM sequence: CAG
ggcctcttttctttaaaatg

SEQ ID NO: 11653 - DNA, 20 bp, Artificial Sequence
  Description of Artificial Sequence: Synthetic oligonucleotide
  Target: ANGPTL4; (+) strand; PAM type: NRG; PAM sequence: TGG
tttaaaatgcagcccttgtc

SEQ ID NO: 11654 - DNA, 20 bp, Artificial Sequence
  Description of Artificial Sequence: Synthetic oligonucleotide
  Target: ANGPTL4; (+) strand; PAM type: NRG; PAM sequence: GGG
ttaaaatgcagcccttgtct

SEQ ID NO: 11655 - DNA, 20 bp, Artificial Sequence
  Description of Artificial Sequence: Synthetic oligonucleotide
  Target: ANGPTL4; (+) strand; PAM type: NRG; PAM sequence: TAG
atgcagcccttgtctgggtg

SEQ ID NO: 11656 - DNA, 20 bp, Artificial Sequence
  Description of Artificial Sequence: Synthetic oligonucleotide
  Target: ANGPTL4; (+) strand; PAM type: NRG; PAM sequence: TGG
cagcccttgtctgggtgtag

SEQ ID NO: 11657 - DNA, 20 bp, Artificial Sequence
  Description of Artificial Sequence: Synthetic oligonucleotide
  Target: ANGPTL4; (+) strand; PAM type: NRG; PAM sequence: TGG
tatctgtaatcccgacactt

SEQ ID NO: 11658 - DNA, 20 bp, Artificial Sequence
  Description of Artificial Sequence: Synthetic oligonucleotide
  Target: ANGPTL4; (+) strand; PAM type: NRG; PAM sequence: GGG
atctgtaatcccgacacttt

SEQ ID NO: 11659 - DNA, 20 bp, Artificial Sequence
  Description of Artificial Sequence: Synthetic oligonucleotide
  Target: ANGPTL4; (+) strand; PAM type: NRG; PAM sequence: GAG
ctgtaatcccgacactttgg

SEQ ID NO: 11660 - DNA, 20 bp, Artificial Sequence
  Description of Artificial Sequence: Synthetic oligonucleotide
  Target: ANGPTL4; (+) strand; PAM type: NRG; PAM sequence: AGG
tgtaatcccgacactttggg

SEQ ID NO: 11661 - DNA, 20 bp, Artificial Sequence
  Description of Artificial Sequence: Synthetic oligonucleotide
  Target: ANGPTL4; (+) strand; PAM type: NRG; PAM sequence: GAG
cactttgggaggcctatcat

SEQ ID NO: 11662 - DNA, 20 bp, Artificial Sequence
  Description of Artificial Sequence: Synthetic oligonucleotide
  Target: ANGPTL4; (+) strand; PAM type: NRG; PAM sequence: AGG
actttgggaggcctatcatg

SEQ ID NO: 11663 - DNA, 20 bp, Artificial Sequence
  Description of Artificial Sequence: Synthetic oligonucleotide
  Target: ANGPTL4; (+) strand; PAM type: NRG; PAM sequence: GAG
gcctatcatgaggatcactt

SEQ ID NO: 11664 - DNA, 20 bp, Artificial Sequence
  Description of Artificial Sequence: Synthetic oligonucleotide
  Target: ANGPTL4; (+) strand; PAM type: NRG; PAM sequence: CAG
tcatgaggatcacttgagcc

SEQ ID NO: 11665 - DNA, 20 bp, Artificial Sequence
  Description of Artificial Sequence: Synthetic oligonucleotide
  Target: ANGPTL4; (+) strand; PAM type: NRG; PAM sequence: AAG
tgaggatcacttgagcccag

SEQ ID NO: 11666 - DNA, 20 bp, Artificial Sequence
  Description of Artificial Sequence: Synthetic oligonucleotide
  Target: ANGPTL4; (+) strand; PAM type: NRG; PAM sequence: GAG
tcacttgagcccagaagttc

SEQ ID NO: 11667 - DNA, 20 bp, Artificial Sequence
  Description of Artificial Sequence: Synthetic oligonucleotide
  Target: ANGPTL4; (+) strand; PAM type: NRG; PAM sequence: CAG
tgagcccagaagttcgagac

SEQ ID NO: 11668 - DNA, 20 bp, Artificial Sequence
  Description of Artificial Sequence: Synthetic oligonucleotide
  Target: ANGPTL4; (+) strand; PAM type: NRG; PAM sequence: TGG
ccagaagttcgagaccagcc

SEQ ID NO: 11669 - DNA, 20 bp, Artificial Sequence
  Description of Artificial Sequence: Synthetic oligonucleotide
  Target: ANGPTL4; (+) strand; PAM type: NRG; PAM sequence: TAG
cgagaccagcctggacaaca

SEQ ID NO: 11670 - DNA, 20 bp, Artificial Sequence
  Description of Artificial Sequence: Synthetic oligonucleotide
  Target: ANGPTL4; (+) strand; PAM type: NRG; PAM sequence: GAG
accagcctggacaacatagt

SEQ ID NO: 11671 - DNA, 20 bp, Artificial Sequence
  Description of Artificial Sequence: Synthetic oligonucleotide
  Target: ANGPTL4; (+) strand; PAM type: NRG; PAM sequence: GAG
cagcctggacaacatagtga

SEQ ID NO: 11672 - DNA, 20 bp, Artificial Sequence
  Description of Artificial Sequence: Synthetic oligonucleotide
  Target: ANGPTL4; (+) strand; PAM type: NRG; PAM sequence: AAG
ctttacaaaaaattttgtaa

SEQ ID NO: 11673 - DNA, 20 bp, Artificial Sequence
  Description of Artificial Sequence: Synthetic oligonucleotide
  Target: ANGPTL4; (+) strand; PAM type: NRG; PAM sequence: AAG
attttgtaaaagtaaaaaaa

SEQ ID NO: 11674 - DNA, 20 bp, Artificial Sequence
  Description of Artificial Sequence: Synthetic oligonucleotide
  Target: ANGPTL4; (+) strand; PAM type: NRG; PAM sequence: AGG
ttttgtaaaagtaaaaaaaa

SEQ ID NO: 11675 - DNA, 20 bp, Artificial Sequence
  Description of Artificial Sequence: Synthetic oligonucleotide
  Target: ANGPTL4; (+) strand; PAM type: NRG; PAM sequence: AAG
taaaagtaaaaaaaaaggcc

SEQ ID NO: 11676 - DNA, 20 bp, Artificial Sequence
  Description of Artificial Sequence: Synthetic oligonucleotide
  Target: ANGPTL4; (+) strand; PAM type: NRG; PAM sequence: CAG
gtaaaaaaaaaggccaagtg

SEQ ID NO: 11677 - DNA, 20 bp, Artificial Sequence
  Description of Artificial Sequence: Synthetic oligonucleotide
  Target: ANGPTL4; (+) strand; PAM type: NRG; PAM sequence: TGG
aaaaaaaaggccaagtgcag

SEQ ID NO: 11678 - DNA, 20 bp, Artificial Sequence
  Description of Artificial Sequence: Synthetic oligonucleotide
  Target: ANGPTL4; (+) strand; PAM type: NRG; PAM sequence: CAG
gtggctcacacctgtaatcc

SEQ ID NO: 11679 - DNA, 20 bp, Artificial Sequence
  Description of Artificial Sequence: Synthetic oligonucleotide
  Target: ANGPTL4; (+) strand; PAM type: NRG; PAM sequence: TGG
cacctgtaatcccagcactt

SEQ ID NO: 11680 - DNA, 20 bp, Artificial Sequence
  Description of Artificial Sequence: Synthetic oligonucleotide
  Target: ANGPTL4; (+) strand; PAM type: NRG; PAM sequence: GGG
acctgtaatcccagcacttt

SEQ ID NO: 11681 - DNA, 20 bp, Artificial Sequence
  Description of Artificial Sequence: Synthetic oligonucleotide
  Target: ANGPTL4; (+) strand; PAM type: NRG; PAM sequence: GAG
ctgtaatcccagcactttgg

SEQ ID NO: 11682 - DNA, 20 bp, Artificial Sequence
  Description of Artificial Sequence: Synthetic oligonucleotide
  Target: ANGPTL4; (+) strand; PAM type: NRG; PAM sequence: AGG
tgtaatcccagcactttggg

SEQ ID NO: 11683 - DNA, 20 bp, Artificial Sequence
  Description of Artificial Sequence: Synthetic oligonucleotide
  Target: ANGPTL4; (+) strand; PAM type: NRG; PAM sequence: GAG
tcccagcactttgggaggtt

SEQ ID NO: 11684 - DNA, 20 bp, Artificial Sequence
  Description of Artificial Sequence: Synthetic oligonucleotide
  Target: ANGPTL4; (+) strand; PAM type: NRG; PAM sequence: AGG
cccagcactttgggaggttg

SEQ ID NO: 11685 - DNA, 20 bp, Artificial Sequence
  Description of Artificial Sequence: Synthetic oligonucleotide
  Target: ANGPTL4; (+) strand; PAM type: NRG; PAM sequence: CAG
agcactttgggaggttgagg

SEQ ID NO: 11686 - DNA, 20 bp, Artificial Sequence
  Description of Artificial Sequence: Synthetic oligonucleotide
  Target: ANGPTL4; (+) strand; PAM type: NRG; PAM sequence: CAG
ctttgggaggttgaggcaga

SEQ ID NO: 11687 - DNA, 20 bp, Artificial Sequence
  Description of Artificial Sequence: Synthetic oligonucleotide
  Target: ANGPTL4; (+) strand; PAM type: NRG; PAM sequence: GAG
ggttgaggcagacagatcac

SEQ ID NO: 11688 - DNA, 20 bp, Artificial Sequence
  Description of Artificial Sequence: Synthetic oligonucleotide
  Target: ANGPTL4; (+) strand; PAM type: NRG; PAM sequence: AGG
gttgaggcagacagatcacg

SEQ ID NO: 11689 - DNA, 20 bp, Artificial Sequence
  Description of Artificial Sequence: Synthetic oligonucleotide
  Target: ANGPTL4; (+) strand; PAM type: NRG; PAM sequence: CAG
aggcagacagatcacgaggt

SEQ ID NO: 11690 - DNA, 20 bp, Artificial Sequence
  Description of Artificial Sequence: Synthetic oligonucleotide
  Target: ANGPTL4; (+) strand; PAM type: NRG; PAM sequence: AGG
ggcagacagatcacgaggtc

SEQ ID NO: 11691 - DNA, 20 bp, Artificial Sequence
  Description of Artificial Sequence: Synthetic oligonucleotide
  Target: ANGPTL4; (+) strand; PAM type: NRG; PAM sequence: GAG
cagacagatcacgaggtcag

SEQ ID NO: 11692 - DNA, 20 bp, Artificial Sequence
  Description of Artificial Sequence: Synthetic oligonucleotide
  Target: ANGPTL4; (+) strand; PAM type: NRG; PAM sequence: GAG
gatcacgaggtcaggagttc

SEQ ID NO: 11693 - DNA, 20 bp, Artificial Sequence
  Description of Artificial Sequence: Synthetic oligonucleotide
  Target: ANGPTL4; (+) strand; PAM type: NRG; PAM sequence: CAG
cgaggtcaggagttcgagac

SEQ ID NO: 11694 - DNA, 20 bp, Artificial Sequence
  Description of Artificial Sequence: Synthetic oligonucleotide
  Target: ANGPTL4; (+) strand; PAM type: NRG; PAM sequence: TGG
cgagaccagcctgaccaaca

SEQ ID NO: 11695 - DNA, 20 bp, Artificial Sequence
  Description of Artificial Sequence: Synthetic oligonucleotide
  Target: ANGPTL4; (+) strand; PAM type: NRG; PAM sequence: TAG
tctactaaaaatacaaaaat

SEQ ID NO: 11696 - DNA, 20 bp, Artificial Sequence
  Description of Artificial Sequence: Synthetic oligonucleotide
  Target: ANGPTL4; (+) strand; PAM type: NRG; PAM sequence: CGG
ctaaaaatacaaaaattagc

SEQ ID NO: 11697 - DNA, 20 bp, Artificial Sequence
  Description of Artificial Sequence: Synthetic oligonucleotide
  Target: ANGPTL4; (+) strand; PAM type: NRG; PAM sequence: GGG
taaaaatacaaaaattagcc

SEQ ID NO: 11698 - DNA, 20 bp, Artificial Sequence
  Description of Artificial Sequence: Synthetic oligonucleotide
  Target: ANGPTL4; (+) strand; PAM type: NRG; PAM sequence: TGG
atacaaaaattagccgggca

SEQ ID NO: 11699 - DNA, 20 bp, Artificial Sequence
  Description of Artificial Sequence: Synthetic oligonucleotide
  Target: ANGPTL4; (+) strand; PAM type: NRG; PAM sequence: TGG
caaaaattagccgggcatgg

SEQ ID NO: 11700 - DNA, 20 bp, Artificial Sequence
  Description of Artificial Sequence: Synthetic oligonucleotide
  Target: ANGPTL4; (+) strand; PAM type: NRG; PAM sequence: CAG
gtggtgtgcacctgtaatcc

SEQ ID NO: 11701 - DNA, 20 bp, Artificial Sequence
  Description of Artificial Sequence: Synthetic oligonucleotide
  Target: ANGPTL4; (+) strand; PAM type: NRG; PAM sequence: CAG
cacctgtaatcccagctact

SEQ ID NO: 11702 - DNA, 20 bp, Artificial Sequence
  Description of Artificial Sequence: Synthetic oligonucleotide
  Target: ANGPTL4; (+) strand; PAM type: NRG; PAM sequence: AGG
acctgtaatcccagctactc

SEQ ID NO: 11703 - DNA, 20 bp, Artificial Sequence
  Description of Artificial Sequence: Synthetic oligonucleotide
  Target: ANGPTL4; (+) strand; PAM type: NRG; PAM sequence: TGG
tgtaatcccagctactcagg

SEQ ID NO: 11704 - DNA, 20 bp, Artificial Sequence
  Description of Artificial Sequence: Synthetic oligonucleotide
  Target: ANGPTL4; (+) strand; PAM type: NRG; PAM sequence: GAG
tcccagctactcaggtggct

SEQ ID NO: 11705 - DNA, 20 bp, Artificial Sequence
  Description of Artificial Sequence: Synthetic oligonucleotide
  Target: ANGPTL4; (+) strand; PAM type: NRG; PAM sequence: AGG
cccagctactcaggtggctg

SEQ ID NO: 11706 - DNA, 20 bp, Artificial Sequence
  Description of Artificial Sequence: Synthetic oligonucleotide
  Target: ANGPTL4; (+) strand; PAM type: NRG; PAM sequence: CAG
agctactcaggtggctgagg

SEQ ID NO: 11707 - DNA, 20 bp, Artificial Sequence
  Description of Artificial Sequence: Synthetic oligonucleotide
  Target: ANGPTL4; (+) strand; PAM type: NRG; PAM sequence: AGG
gctactcaggtggctgaggc

SEQ ID NO: 11708 - DNA, 20 bp, Artificial Sequence
  Description of Artificial Sequence: Synthetic oligonucleotide
  Target: ANGPTL4; (+) strand; PAM type: NRG; PAM sequence: GAG
tactcaggtggctgaggcag

SEQ ID NO: 11709 - DNA, 20 bp, Artificial Sequence
  Description of Artificial Sequence: Synthetic oligonucleotide
  Target: ANGPTL4; (+) strand; PAM type: NRG; PAM sequence: TGG
gcaggagaatctcttgaacc

SEQ ID NO: 11710 - DNA, 20 bp, Artificial Sequence
  Description of Artificial Sequence: Synthetic oligonucleotide
  Target: ANGPTL4; (+) strand; PAM type: NRG; PAM sequence: GGG
caggagaatctcttgaacct

SEQ ID NO: 11711 - DNA, 20 bp, Artificial Sequence
  Description of Artificial Sequence: Synthetic oligonucleotide
  Target: ANGPTL4; (+) strand; PAM type: NRG; PAM sequence: GAG
ggagaatctcttgaacctgg

SEQ ID NO: 11712 - DNA, 20 bp, Artificial Sequence
  Description of Artificial Sequence: Synthetic oligonucleotide
  Target: ANGPTL4; (+) strand; PAM type: NRG; PAM sequence: AGG
gagaatctcttgaacctggg

SEQ ID NO: 11713 - DNA, 20 bp, Artificial Sequence
  Description of Artificial Sequence: Synthetic oligonucleotide
  Target: ANGPTL4; (+) strand; PAM type: NRG; PAM sequence: CAG
aatctcttgaacctgggagg

SEQ ID NO: 11714 - DNA, 20 bp, Artificial Sequence
  Description of Artificial Sequence: Synthetic oligonucleotide
  Target: ANGPTL4; (+) strand; PAM type: NRG; PAM sequence: GAG
tctcttgaacctgggaggca

SEQ ID NO: 11715 - DNA, 20 bp, Artificial Sequence
  Description of Artificial Sequence: Synthetic oligonucleotide
  Target: ANGPTL4; (+) strand; PAM type: NRG; PAM sequence: AGG
ctcttgaacctgggaggcag

SEQ ID NO: 11716 - DNA, 20 bp, Artificial Sequence
  Description of Artificial Sequence: Synthetic oligonucleotide
  Target: ANGPTL4; (+) strand; PAM type: NRG; PAM sequence: CAG
aacctgggaggcagaggttg

SEQ ID NO: 11717 - DNA, 20 bp, Artificial Sequence
  Description of Artificial Sequence: Synthetic oligonucleotide
  Target: ANGPTL4; (+) strand; PAM type: NRG; PAM sequence: GAG
tgggaggcagaggttgcagt

SEQ ID NO: 11718 - DNA, 20 bp, Artificial Sequence
  Description of Artificial Sequence: Synthetic oligonucleotide
  Target: ANGPTL4; (+) strand; PAM type: NRG; PAM sequence: GAG
ggcagaggttgcagtgagct

SEQ ID NO: 11719 - DNA, 20 bp, Artificial Sequence
  Description of Artificial Sequence: Synthetic oligonucleotide
  Target: ANGPTL4; (+) strand; PAM type: NRG; PAM sequence: CAG
gagatgacgccaccgcactc

SEQ ID NO: 11720 - DNA, 20 bp, Artificial Sequence
  Description of Artificial Sequence: Synthetic oligonucleotide
  Target: ANGPTL4; (+) strand; PAM type: NRG; PAM sequence: TGG
gacgccaccgcactccagcc

SEQ ID NO: 11721 - DNA, 20 bp, Artificial Sequence
  Description of Artificial Sequence: Synthetic oligonucleotide
  Target: ANGPTL4; (+) strand; PAM type: NRG; PAM sequence: GGG
acgccaccgcactccagcct

SEQ ID NO: 11722 - DNA, 20 bp, Artificial Sequence
  Description of Artificial Sequence: Synthetic oligonucleotide
  Target: ANGPTL4; (+) strand; PAM type: NRG; PAM sequence: CAG
ccgcactccagcctgggcga

SEQ ID NO: 11723 - DNA, 20 bp, Artificial Sequence
  Description of Artificial Sequence: Synthetic oligonucleotide
  Target: ANGPTL4; (+) strand; PAM type: NRG; PAM sequence: GAG
gcactccagcctgggcgaca

SEQ ID NO: 11724 - DNA, 20 bp, Artificial Sequence
  Description of Artificial Sequence: Synthetic oligonucleotide
  Target: ANGPTL4; (+) strand; PAM type: NRG; PAM sequence: GAG
tccagcctgggcgacagagc

SEQ ID NO: 11725 - DNA, 20 bp, Artificial Sequence
  Description of Artificial Sequence: Synthetic oligonucleotide
  Target: ANGPTL4; (+) strand; PAM type: NRG; PAM sequence: AAG
cccccatcaaaaaaataaaa

SEQ ID NO: 11726 - DNA, 20 bp, Artificial Sequence
  Description of Artificial Sequence: Synthetic oligonucleotide
  Target: ANGPTL4; (+) strand; PAM type: NRG; PAM sequence: GAG
cccatcaaaaaaataaaaaa

SEQ ID NO: 11727 - DNA, 20 bp, Artificial Sequence
  Description of Artificial Sequence: Synthetic oligonucleotide
  Target: ANGPTL4; (+) strand; PAM type: NRG; PAM sequence: CAG
aaataaaataaaataaaatt

SEQ ID NO: 11728 - DNA, 20 bp, Artificial Sequence
  Description of Artificial Sequence: Synthetic oligonucleotide
  Target: ANGPTL4; (+) strand; PAM type: NRG; PAM sequence: TGG
aaataaaattcagcccttgc

SEQ ID NO: 11729 - DNA, 20 bp, Artificial Sequence
  Description of Artificial Sequence: Synthetic oligonucleotide
  Target: ANGPTL4; (+) strand; PAM type: NRG; PAM sequence: GGG
aataaaattcagcccttgct

SEQ ID NO: 11730 - DNA, 20 bp, Artificial Sequence
  Description of Artificial Sequence: Synthetic oligonucleotide
  Target: ANGPTL4; (+) strand; PAM type: NRG; PAM sequence: TGG
aattcagcccttgctgggca

SEQ ID NO: 11731 - DNA, 20 bp, Artificial Sequence
  Description of Artificial Sequence: Synthetic oligonucleotide
  Target: ANGPTL4; (+) strand; PAM type: NRG; PAM sequence: TGG
tcagcccttgctgggcatgg

SEQ ID NO: 11732 - DNA, 20 bp, Artificial Sequence
  Description of Artificial Sequence: Synthetic oligonucleotide
  Target: ANGPTL4; (+) strand; PAM type: NRG; PAM sequence: TAG
ggcatggtggcacatgcctg

SEQ ID NO: 11733 - DNA, 20 bp, Artificial Sequence
  Description of Artificial Sequence: Synthetic oligonucleotide
  Target: ANGPTL4; (+) strand; PAM type: NRG; PAM sequence: CAG
gtggcacatgcctgtagtcc

SEQ ID NO: 11734 - DNA, 20 bp, Artificial Sequence
  Description of Artificial Sequence: Synthetic oligonucleotide
  Target: ANGPTL4; (+) strand; PAM type: NRG; PAM sequence: CGG
tgcctgtagtcccagctact

SEQ ID NO: 11735 - DNA, 20 bp, Artificial Sequence
  Description of Artificial Sequence: Synthetic oligonucleotide
  Target: ANGPTL4; (+) strand; PAM type: NRG; PAM sequence: GGG
gcctgtagtcccagctactc

SEQ ID NO: 11736 - DNA, 20 bp, Artificial Sequence
  Description of Artificial Sequence: Synthetic oligonucleotide
  Target: ANGPTL4; (+) strand; PAM type: NRG; PAM sequence: GAG
ctgtagtcccagctactcgg

SEQ ID NO: 11737 - DNA, 20 bp, Artificial Sequence
  Description of Artificial Sequence: Synthetic oligonucleotide
  Target: ANGPTL4; (+) strand; PAM type: NRG; PAM sequence: AGG
tgtagtcccagctactcggg

SEQ ID NO: 11738 - DNA, 20 bp, Artificial Sequence
  Description of Artificial Sequence: Synthetic oligonucleotide
  Target: ANGPTL4; (+) strand; PAM type: NRG; PAM sequence: AAG
tcccagctactcgggaggcc

SEQ ID NO: 11739 - DNA, 20 bp, Artificial Sequence
  Description of Artificial Sequence: Synthetic oligonucleotide
  Target: ANGPTL4; (+) strand; PAM type: NRG; PAM sequence: AGG
cccagctactcgggaggcca

SEQ ID NO: 11740 - DNA, 20 bp, Artificial Sequence
  Description of Artificial Sequence: Synthetic oligonucleotide
  Target: ANGPTL4; (+) strand; PAM type: NRG; PAM sequence: CAG
agctactcgggaggccaagg

SEQ ID NO: 11741 - DNA, 20 bp, Artificial Sequence
  Description of Artificial Sequence: Synthetic oligonucleotide
  Target: ANGPTL4; (+) strand; PAM type: NRG; PAM sequence: AGG
gctactcgggaggccaaggc

SEQ ID NO: 11742 - DNA, 20 bp, Artificial Sequence
  Description of Artificial Sequence: Synthetic oligonucleotide
  Target: ANGPTL4; (+) strand; PAM type: NRG; PAM sequence: GAG
tactcgggaggccaaggcag

SEQ ID NO: 11743 - DNA, 20 bp, Artificial Sequence
  Description of Artificial Sequence: Synthetic oligonucleotide
  Target: ANGPTL4; (+) strand; PAM type: NRG; PAM sequence: AGG
actcgggaggccaaggcagg

SEQ ID NO: 11744 - DNA, 20 bp, Artificial Sequence
  Description of Artificial Sequence: Synthetic oligonucleotide
  Target: ANGPTL4; (+) strand; PAM type: NRG; PAM sequence: GGG
ctcgggaggccaaggcagga

SEQ ID NO: 11745 - DNA, 20 bp, Artificial Sequence
  Description of Artificial Sequence: Synthetic oligonucleotide
  Target: ANGPTL4; (+) strand; PAM type: NRG; PAM sequence: CAG
ccaaggcaggagggtcactt

SEQ ID NO: 11746 - DNA, 20 bp, Artificial Sequence
  Description of Artificial Sequence: Synthetic oligonucleotide
  Target: ANGPTL4; (+) strand; PAM type: NRG; PAM sequence: CAG
gcaggagggtcacttcagcc

SEQ ID NO: 11747 - DNA, 20 bp, Artificial Sequence
  Description of Artificial Sequence: Synthetic oligonucleotide
  Target: ANGPTL4; (+) strand; PAM type: NRG; PAM sequence: AGG
caggagggtcacttcagccc

SEQ ID NO: 11748 - DNA, 20 bp, Artificial Sequence
  Description of Artificial Sequence: Synthetic oligonucleotide
  Target: ANGPTL4; (+) strand; PAM type: NRG; PAM sequence: GAG
ggagggtcacttcagcccag

SEQ ID NO: 11749 - DNA, 20 bp, Artificial Sequence
  Description of Artificial Sequence: Synthetic oligonucleotide
  Target: ANGPTL4; (+) strand; PAM type: NRG; PAM sequence: AAG
tcacttcagcccaggagtta

SEQ ID NO: 11750 - DNA, 20 bp, Artificial Sequence
  Description of Artificial Sequence: Synthetic oligonucleotide
  Target: ANGPTL4; (+) strand; PAM type: NRG; PAM sequence: AGG
cacttcagcccaggagttaa

SEQ ID NO: 11751 - DNA, 20 bp, Artificial Sequence
  Description of Artificial Sequence: Synthetic oligonucleotide
  Target: ANGPTL4; (+) strand; PAM type: NRG; PAM sequence: GAG
caggagttaaaggctgccgt

SEQ ID NO: 11752 - DNA, 20 bp, Artificial Sequence
  Description of Artificial Sequence: Synthetic oligonucleotide
  Target: ANGPTL4; (+) strand; PAM type: NRG; PAM sequence: TAG
gccgtgatcacacctgtgaa

SEQ ID NO: 11753 - DNA, 20 bp, Artificial Sequence
  Description of Artificial Sequence: Synthetic oligonucleotide
  Target: ANGPTL4; (+) strand; PAM type: NRG; PAM sequence: TGG
atagccaccgcactccaacc

SEQ ID NO: 11754 - DNA, 20 bp, Artificial Sequence
  Description of Artificial Sequence: Synthetic oligonucleotide
  Target: ANGPTL4; (+) strand; PAM type: NRG; PAM sequence: GGG
tagccaccgcactccaacct

SEQ ID NO: 11755 - DNA, 20 bp, Artificial Sequence
  Description of Artificial Sequence: Synthetic oligonucleotide
  Target: ANGPTL4; (+) strand; PAM type: NRG; PAM sequence: AAG
ctcgtttctaaaaaaaaaca

SEQ ID NO: 11756 - DNA, 20 bp, Artificial Sequence
  Description of Artificial Sequence: Synthetic oligonucleotide
  Target: ANGPTL4; (+) strand; PAM type: NRG; PAM sequence: AGG
tcgtttctaaaaaaaaacaa

SEQ ID NO: 11757 - DNA, 20 bp, Artificial Sequence
  Description of Artificial Sequence: Synthetic oligonucleotide
  Target: ANGPTL4; (+) strand; PAM type: NRG; PAM sequence: GAG
tctaaaaaaaaacaaaggct

SEQ ID NO: 11758 - DNA, 20 bp, Artificial Sequence
  Description of Artificial Sequence: Synthetic oligonucleotide
  Target: ANGPTL4; (+) strand; PAM type: NRG; PAM sequence: CGG
aaaaaaacaaaggctgagca

SEQ ID NO: 11759 - DNA, 20 bp, Artificial Sequence
  Description of Artificial Sequence: Synthetic oligonucleotide
  Target: ANGPTL4; (+) strand; PAM type: NRG; PAM sequence: TGG
aaaacaaaggctgagcacgg

SEQ ID NO: 11760 - DNA, 20 bp, Artificial Sequence
  Description of Artificial Sequence: Synthetic oligonucleotide
  Target: ANGPTL4; (+) strand; PAM type: NRG; PAM sequence: CAG
gtggcttacacctgaaatgc

SEQ ID NO: 11761 - DNA, 20 bp, Artificial Sequence
  Description of Artificial Sequence: Synthetic oligonucleotide
  Target: ANGPTL4; (+) strand; PAM type: NRG; PAM sequence: TGG
cacctgaaatgccagcactt

SEQ ID NO: 11762 - DNA, 20 bp, Artificial Sequence
  Description of Artificial Sequence: Synthetic oligonucleotide
  Target: ANGPTL4; (+) strand; PAM type: NRG; PAM sequence: GGG
acctgaaatgccagcacttt

SEQ ID NO: 11763 - DNA, 20 bp, Artificial Sequence
  Description of Artificial Sequence: Synthetic oligonucleotide
  Target: ANGPTL4; (+) strand; PAM type: NRG; PAM sequence: GAG
ctgaaatgccagcactttgg

SEQ ID NO: 11764 - DNA, 20 bp, Artificial Sequence
  Description of Artificial Sequence: Synthetic oligonucleotide
  Target: ANGPTL4; (+) strand; PAM type: NRG; PAM sequence: AGG
tgaaatgccagcactttggg

SEQ ID NO: 11765 - DNA, 20 bp, Artificial Sequence
  Description of Artificial Sequence: Synthetic oligonucleotide
  Target: ANGPTL4; (+) strand; PAM type: NRG; PAM sequence: GAG
tgccagcactttgggaggct

SEQ ID NO: 11766 - DNA, 20 bp, Artificial Sequence
  Description of Artificial Sequence: Synthetic oligonucleotide
  Target: ANGPTL4; (+) strand; PAM type: NRG; PAM sequence: AGG
gccagcactttgggaggctg

SEQ ID NO: 11767 - DNA, 20 bp, Artificial Sequence
  Description of Artificial Sequence: Synthetic oligonucleotide
  Target: ANGPTL4; (+) strand; PAM type: NRG; PAM sequence: CGG
agcactttgggaggctgagg

SEQ ID NO: 11768 - DNA, 20 bp, Artificial Sequence
  Description of Artificial Sequence: Synthetic oligonucleotide
  Target: ANGPTL4; (+) strand; PAM type: NRG; PAM sequence: GGG
gcactttgggaggctgaggc

SEQ ID NO: 11769 - DNA, 20 bp, Artificial Sequence
  Description of Artificial Sequence: Synthetic oligonucleotide
  Target: ANGPTL4; (+) strand; PAM type: NRG; PAM sequence: GAG
ctgaggcgggcaaatcactt

SEQ ID NO: 11770 - DNA, 20 bp, Artificial Sequence
  Description of Artificial Sequence: Synthetic oligonucleotide
  Target: ANGPTL4; (+) strand; PAM type: NRG; PAM sequence: AGG
tgaggcgggcaaatcacttg

SEQ ID NO: 11771 - DNA, 20 bp, Artificial Sequence
  Description of Artificial Sequence: Synthetic oligonucleotide
  Target: ANGPTL4; (+) strand; PAM type: NRG; PAM sequence: CAG
gcgggcaaatcacttgaggt

SEQ ID NO: 11772 - DNA, 20 bp, Artificial Sequence
  Description of Artificial Sequence: Synthetic oligonucleotide
  Target: ANGPTL4; (+) strand; PAM type: NRG; PAM sequence: AAG
ggcaaatcacttgaggtcag

SEQ ID NO: 11773 - DNA, 20 bp, Artificial Sequence
  Description of Artificial Sequence: Synthetic oligonucleotide
  Target: ANGPTL4; (+) strand; PAM type: NRG; PAM sequence: AAG
tcacttgaggtcagaagttc

SEQ ID NO: 11774 - DNA, 20 bp, Artificial Sequence
  Description of Artificial Sequence: Synthetic oligonucleotide
  Target: ANGPTL4; (+) strand; PAM type: NRG; PAM sequence: CAG
tgaggtcagaagttcaagac

SEQ ID NO: 11775 - DNA, 20 bp, Artificial Sequence
  Description of Artificial Sequence: Synthetic oligonucleotide
  Target: ANGPTL4; (+) strand; PAM type: NRG; PAM sequence: TGG
tcagaagttcaagaccagcc

SEQ ID NO: 11776 - DNA, 20 bp, Artificial Sequence
  Description of Artificial Sequence: Synthetic oligonucleotide
  Target: ANGPTL4; (+) strand; PAM type: NRG; PAM sequence: TGG
caagaccagcctggccaaca

SEQ ID NO: 11777 - DNA, 20 bp, Artificial Sequence
  Description of Artificial Sequence: Synthetic oligonucleotide
  Target: ANGPTL4; (+) strand; PAM type: NRG; PAM sequence: TAG
atctctaccaacataaacat

SEQ ID NO: 11778 - DNA, 20 bp, Artificial Sequence
  Description of Artificial Sequence: Synthetic oligonucleotide
  Target: ANGPTL4; (+) strand; PAM type: NRG; PAM sequence: CGG
ctaccaacataaacattagc

SEQ ID NO: 11779 - DNA, 20 bp, Artificial Sequence
  Description of Artificial Sequence: Synthetic oligonucleotide
  Target: ANGPTL4; (+) strand; PAM type: NRG; PAM sequence: GGG
taccaacataaacattagcc

SEQ ID NO: 11780 - DNA, 20 bp, Artificial Sequence
  Description of Artificial Sequence: Synthetic oligonucleotide
  Target: ANGPTL4; (+) strand; PAM type: NRG; PAM sequence: CAG
gccgggcgtgcctgtgattc

SEQ ID NO: 11781 - DNA, 20 bp, Artificial Sequence
  Description of Artificial Sequence: Synthetic oligonucleotide
  Target: ANGPTL4; (+) strand; PAM type: NRG; PAM sequence: TGG
cctgtgattccagctgcttg

SEQ ID NO: 11782 - DNA, 20 bp, Artificial Sequence
  Description of Artificial Sequence: Synthetic oligonucleotide
  Target: ANGPTL4; (+) strand; PAM type: NRG; PAM sequence: GGG
ctgtgattccagctgcttgt

SEQ ID NO: 11783 - DNA, 20 bp, Artificial Sequence
  Description of Artificial Sequence: Synthetic oligonucleotide
  Target: ANGPTL4; (+) strand; PAM type: NRG; PAM sequence: GGG
tgtgattccagctgcttgtg

SEQ ID NO: 11784 - DNA, 20 bp, Artificial Sequence
  Description of Artificial Sequence: Synthetic oligonucleotide
  Target: ANGPTL4; (+) strand; PAM type: NRG; PAM sequence: AAG
tccagctgcttgtggggctg

SEQ ID NO: 11785 - DNA, 20 bp, Artificial Sequence
  Description of Artificial Sequence: Synthetic oligonucleotide
  Target: ANGPTL4; (+) strand; PAM type: NRG; PAM sequence: AAG
tgcttgtggggctgaagcac

SEQ ID NO: 11786 - DNA, 20 bp, Artificial Sequence
  Description of Artificial Sequence: Synthetic oligonucleotide
  Target: ANGPTL4; (+) strand; PAM type: NRG; PAM sequence: GAG
ctgaagcacaagaatcgctt

SEQ ID NO: 11787 - DNA, 20 bp, Artificial Sequence
  Description of Artificial Sequence: Synthetic oligonucleotide
  Target: ANGPTL4; (+) strand; PAM type: NRG; PAM sequence: AAG
caagaatcgcttgagccccg

SEQ ID NO: 11788 - DNA, 20 bp, Artificial Sequence
  Description of Artificial Sequence: Synthetic oligonucleotide
  Target: ANGPTL4; (+) strand; PAM type: NRG; PAM sequence: AGG
aagaatcgcttgagccccga

SEQ ID NO: 11789 - DNA, 20 bp, Artificial Sequence
  Description of Artificial Sequence: Synthetic oligonucleotide
  Target: ANGPTL4; (+) strand; PAM type: NRG; PAM sequence: CAG
aatcgcttgagccccgaagg

SEQ ID NO: 11790 - DNA, 20 bp, Artificial Sequence
  Description of Artificial Sequence: Synthetic oligonucleotide
  Target: ANGPTL4; (+) strand; PAM type: NRG; PAM sequence: GAG
tcgcttgagccccgaaggca

SEQ ID NO: 11791 - DNA, 20 bp, Artificial Sequence
  Description of Artificial Sequence: Synthetic oligonucleotide
  Target: ANGPTL4; (+) strand; PAM type: NRG; PAM sequence: AGG
cgcttgagccccgaaggcag

SEQ ID NO: 11792 - DNA, 20 bp, Artificial Sequence
  Description of Artificial Sequence: Synthetic oligonucleotide
  Target: ANGPTL4; (+) strand; PAM type: NRG; PAM sequence: CAG
agccccgaaggcagaggttg

SEQ ID NO: 11793 - DNA, 20 bp, Artificial Sequence
  Description of Artificial Sequence: Synthetic oligonucleotide
  Target: ANGPTL4; (+) strand; PAM type: NRG; PAM sequence: GAG
ccgaaggcagaggttgcagt

SEQ ID NO: 11794 - DNA, 20 bp, Artificial Sequence
  Description of Artificial Sequence: Synthetic oligonucleotide
  Target: ANGPTL4; (+) strand; PAM type: NRG; PAM sequence: GAG
ggcagaggttgcagtgagct

SEQ ID NO: 11795 - DNA, 20 bp, Artificial Sequence
  Description of Artificial Sequence: Synthetic oligonucleotide
  Target: ANGPTL4; (+) strand; PAM type: NRG; PAM sequence: CGG
gttgcagtgagctgagattg

SEQ ID NO: 11796 - DNA, 20 bp, Artificial Sequence
  Description of Artificial Sequence: Synthetic oligonucleotide
  Target: ANGPTL4; (+) strand; PAM type: NRG; PAM sequence: CAG
gagattgcggcactgcgatc

SEQ ID NO: 11797 - DNA, 20 bp, Artificial Sequence
  Description of Artificial Sequence: Synthetic oligonucleotide
  Target: ANGPTL4; (+) strand; PAM type: NRG; PAM sequence: TGG
tgcggcactgcgatccagcc

SEQ ID NO: 11798 - DNA, 20 bp, Artificial Sequence
  Description of Artificial Sequence: Synthetic oligonucleotide
  Target: ANGPTL4; (+) strand; PAM type: NRG; PAM sequence: GGG
gcggcactgcgatccagcct

SEQ ID NO: 11799 - DNA, 20 bp, Artificial Sequence
  Description of Artificial Sequence: Synthetic oligonucleotide
  Target: ANGPTL4; (+) strand; PAM type: NRG; PAM sequence: CAG
ctgcgatccagcctgggcaa

SEQ ID NO: 11800 - DNA, 20 bp, Artificial Sequence
  Description of Artificial Sequence: Synthetic oligonucleotide
  Target: ANGPTL4; (+) strand; PAM type: NRG; PAM sequence: GAG
gcgatccagcctgggcaaca

SEQ ID NO: 11801 - DNA, 20 bp, Artificial Sequence
  Description of Artificial Sequence: Synthetic oligonucleotide
  Target: ANGPTL4; (+) strand; PAM type: NRG; PAM sequence: GAG
tccagcctgggcaacagagt

SEQ ID NO: 11802 - DNA, 20 bp, Artificial Sequence
  Description of Artificial Sequence: Synthetic oligonucleotide
  Target: ANGPTL4; (+) strand; PAM type: NRG; PAM sequence: AAG
taaaaaaaaaaaaaaaaaaa

SEQ ID NO: 11803 - DNA, 20 bp, Artificial Sequence
  Description of Artificial Sequence: Synthetic oligonucleotide
  Target: ANGPTL4; (+) strand; PAM type: NRG; PAM sequence: AAG
aaaaaaaaaaaaaaaaaaga

SEQ ID NO: 11804 - DNA, 20 bp, Artificial Sequence
  Description of Artificial Sequence: Synthetic oligonucleotide
  Target: ANGPTL4; (+) strand; PAM type: NRG; PAM sequence: GAG
agaaagcttttttttccact

SEQ ID NO: 11805 - DNA, 20 bp, Artificial Sequence
  Description of Artificial Sequence: Synthetic oligonucleotide
  Target: ANGPTL4; (+) strand; PAM type: NRG; PAM sequence: AAG
aagcttttttttccactgag

SEQ ID NO: 11806 - DNA, 20 bp, Artificial Sequence
  Description of Artificial Sequence: Synthetic oligonucleotide
  Target: ANGPTL4; (+) strand; PAM type: NRG; PAM sequence: AAG
tgagaagtcctttccattac

SEQ ID NO: 11807 - DNA, 20 bp, Artificial Sequence
  Description of Artificial Sequence: Synthetic oligonucleotide
  Target: ANGPTL4; (+) strand; PAM type: NRG; PAM sequence: GAG
agaagtcctttccattacaa

SEQ ID NO: 11808 - DNA, 20 bp, Artificial Sequence
  Description of Artificial Sequence: Synthetic oligonucleotide
  Target: ANGPTL4; (+) strand; PAM type: NRG; PAM sequence: AGG
gaagtcctttccattacaag

SEQ ID NO: 11809 - DNA, 20 bp, Artificial Sequence
  Description of Artificial Sequence: Synthetic oligonucleotide
  Target: ANGPTL4; (+) strand; PAM type: NRG; PAM sequence: CGG
cattacaagaggttacaaca

SEQ ID NO: 11810 - DNA, 20 bp, Artificial Sequence
  Description of Artificial Sequence: Synthetic oligonucleotide
  Target: ANGPTL4; (+) strand; PAM type: NRG; PAM sequence: GGG
attacaagaggttacaacac

SEQ ID NO: 11811 - DNA, 20 bp, Artificial Sequence
  Description of Artificial Sequence: Synthetic oligonucleotide
  Target: ANGPTL4; (+) strand; PAM type: NRG; PAM sequence: GGG
ttacaagaggttacaacacg

SEQ ID NO: 11812 - DNA, 20 bp, Artificial Sequence
  Description of Artificial Sequence: Synthetic oligonucleotide
  Target: ANGPTL4; (+) strand; PAM type: NRG; PAM sequence: CAG
ttacaacacggggttttacc

SEQ ID NO: 11813 - DNA, 20 bp, Artificial Sequence
  Description of Artificial Sequence: Synthetic oligonucleotide
  Target: ANGPTL4; (+) strand; PAM type: NRG; PAM sequence: CAG
acacggggttttacccagtt

SEQ ID NO: 11814 - DNA, 20 bp, Artificial Sequence
  Description of Artificial Sequence: Synthetic oligonucleotide
  Target: ANGPTL4; (+) strand; PAM type: NRG; PAM sequence: TGG
ggggttttacccagttcagc

SEQ ID NO: 11815 - DNA, 20 bp, Artificial Sequence
  Description of Artificial Sequence: Synthetic oligonucleotide
  Target: ANGPTL4; (+) strand; PAM type: NRG; PAM sequence: CAG
tttacccagttcagctggcc

SEQ ID NO: 11816 - DNA, 20 bp, Artificial Sequence
  Description of Artificial Sequence: Synthetic oligonucleotide
  Target: ANGPTL4; (+) strand; PAM type: NRG; PAM sequence: GAG
tacccagttcagctggccca

SEQ ID NO: 11817 - DNA, 20 bp, Artificial Sequence
  Description of Artificial Sequence: Synthetic oligonucleotide
  Target: ANGPTL4; (+) strand; PAM type: NRG; PAM sequence: GAG
cccagttcagctggcccaga

SEQ ID NO: 11818 - DNA, 20 bp, Artificial Sequence
  Description of Artificial Sequence: Synthetic oligonucleotide
  Target: ANGPTL4; (+) strand; PAM type: NRG; PAM sequence: AGG
ccagttcagctggcccagag

SEQ ID NO: 11819 - DNA, 20 bp, Artificial Sequence
  Description of Artificial Sequence: Synthetic oligonucleotide
  Target: ANGPTL4; (+) strand; PAM type: NRG; PAM sequence: CAG
gctggcccagagaggctttg

SEQ ID NO: 11820 - DNA, 20 bp, Artificial Sequence
  Description of Artificial Sequence: Synthetic oligonucleotide
  Target: ANGPTL4; (+) strand; PAM type: NRG; PAM sequence: CAG
tgcctactccctcccacact

SEQ ID NO: 11821 - DNA, 20 bp, Artificial Sequence
  Description of Artificial Sequence: Synthetic oligonucleotide
  Target: ANGPTL4; (+) strand; PAM type: NRG; PAM sequence: TGG
ctcccacactcagtccctgc

SEQ ID NO: 11822 - DNA, 20 bp, Artificial Sequence
  Description of Artificial Sequence: Synthetic oligonucleotide
  Target: ANGPTL4; (+) strand; PAM type: NRG; PAM sequence: GGG
tcccacactcagtccctgct

SEQ ID NO: 11823 - DNA, 20 bp, Artificial Sequence
  Description of Artificial Sequence: Synthetic oligonucleotide
  Target: ANGPTL4; (+) strand; PAM type: NRG; PAM sequence: TGG
ctcagtccctgctgggttct

SEQ ID NO: 11824 - DNA, 20 bp, Artificial Sequence
  Description of Artificial Sequence: Synthetic oligonucleotide
  Target: ANGPTL4; (+) strand; PAM type: NRG; PAM sequence: GGG
tcagtccctgctgggttctt

SEQ ID NO: 11825 - DNA, 20 bp, Artificial Sequence
  Description of Artificial Sequence: Synthetic oligonucleotide
  Target: ANGPTL4; (+) strand; PAM type: NRG; PAM sequence: AAG
cctgctgggttcttgggaca

SEQ ID NO: 11826 - DNA, 20 bp, Artificial Sequence
  Description of Artificial Sequence: Synthetic oligonucleotide
  Target: ANGPTL4; (+) strand; PAM type: NRG; PAM sequence: AAG
cttgggacaaagatcttccc

SEQ ID NO: 11827 - DNA, 20 bp, Artificial Sequence
  Description of Artificial Sequence: Synthetic oligonucleotide
  Target: ANGPTL4; (+) strand; PAM type: NRG; PAM sequence: AGG
ttgggacaaagatcttccca

SEQ ID NO: 11828 - DNA, 20 bp, Artificial Sequence
  Description of Artificial Sequence: Synthetic oligonucleotide
  Target: ANGPTL4; (+) strand; PAM type: NRG; PAM sequence: CAG
gacaaagatcttcccaaggc

SEQ ID NO: 11829 - DNA, 20 bp, Artificial Sequence
  Description of Artificial Sequence: Synthetic oligonucleotide
  Target: ANGPTL4; (+) strand; PAM type: NRG; PAM sequence: GAG
ccctctgacccaccctcctc

SEQ ID NO: 11830 - DNA, 20 bp, Artificial Sequence
  Description of Artificial Sequence: Synthetic oligonucleotide
  Target: ANGPTL4; (+) strand; PAM type: NRG; PAM sequence: CAG
cccaccctcctcgagtcctc

SEQ ID NO: 11831 - DNA, 20 bp, Artificial Sequence
  Description of Artificial Sequence: Synthetic oligonucleotide
  Target: ANGPTL4; (+) strand; PAM type: NRG; PAM sequence: AGG
ccaccctcctcgagtcctcc

SEQ ID NO: 11832 - DNA, 20 bp, Artificial Sequence
  Description of Artificial Sequence: Synthetic oligonucleotide
  Target: ANGPTL4; (+) strand; PAM type: NRG; PAM sequence: GGG
caccctcctcgagtcctcca

SEQ ID NO: 11833 - DNA, 20 bp, Artificial Sequence
  Description of Artificial Sequence: Synthetic oligonucleotide
  Target: ANGPTL4; (+) strand; PAM type: NRG; PAM sequence: GAG
tcctcgagtcctccagggat

SEQ ID NO: 11834 - DNA, 20 bp, Artificial Sequence
  Description of Artificial Sequence: Synthetic oligonucleotide
  Target: ANGPTL4; (+) strand; PAM type: NRG; PAM sequence: GAG
cgagtcctccagggatgagt

SEQ ID NO: 11835 - DNA, 20 bp, Artificial Sequence
  Description of Artificial Sequence: Synthetic oligonucleotide
  Target: ANGPTL4; (+) strand; PAM type: NRG; PAM sequence: AGG
gagtcctccagggatgagtg

SEQ ID NO: 11836 - DNA, 20 bp, Artificial Sequence
  Description of Artificial Sequence: Synthetic oligonucleotide
  Target: ANGPTL4; (+) strand; PAM type: NRG; PAM sequence: GGG
agtcctccagggatgagtga

SEQ ID NO: 11837 - DNA, 20 bp, Artificial Sequence
  Description of Artificial Sequence: Synthetic oligonucleotide
  Target: ANGPTL4; (+) strand; PAM type: NRG; PAM sequence: GAG
tcctccagggatgagtgagg

SEQ ID NO: 11838 - DNA, 20 bp, Artificial Sequence
  Description of Artificial Sequence: Synthetic oligonucleotide
  Target: ANGPTL4; (+) strand; PAM type: NRG; PAM sequence: TGG
tgagggagctgctgtcttcc

SEQ ID NO: 11839 - DNA, 20 bp, Artificial Sequence
  Description of Artificial Sequence: Synthetic oligonucleotide
  Target: ANGPTL4; (+) strand; PAM type: NRG; PAM sequence: GGG
gagggagctgctgtcttcct

SEQ ID NO: 11840 - DNA, 20 bp, Artificial Sequence
  Description of Artificial Sequence: Synthetic oligonucleotide
  Target: ANGPTL4; (+) strand; PAM type: NRG; PAM sequence: TGG
agctgctgtcttcctgggtt

SEQ ID NO: 11841 - DNA, 20 bp, Artificial Sequence
  Description of Artificial Sequence: Synthetic oligonucleotide
  Target: ANGPTL4; (+) strand; PAM type: NRG; PAM sequence: GAG
ctgctgtcttcctgggtttg

SEQ ID NO: 11842 - DNA, 20 bp, Artificial Sequence
  Description of Artificial Sequence: Synthetic oligonucleotide
  Target: ANGPTL4; (+) strand; PAM type: NRG; PAM sequence: AGG
tgctgtcttcctgggtttgg

SEQ ID NO: 11843 - DNA, 20 bp, Artificial Sequence
  Description of Artificial Sequence: Synthetic oligonucleotide
  Target: ANGPTL4; (+) strand; PAM type: NRG; PAM sequence: GGG
gctgtcttcctgggtttgga

SEQ ID NO: 11844 - DNA, 20 bp, Artificial Sequence
  Description of Artificial Sequence: Synthetic oligonucleotide
  Target: ANGPTL4; (+) strand; PAM type: NRG; PAM sequence: GGG
ctgtcttcctgggtttggag

SEQ ID NO: 11845 - DNA, 20 bp, Artificial Sequence
  Description of Artificial Sequence: Synthetic oligonucleotide
  Target: ANGPTL4; (+) strand; PAM type: NRG; PAM sequence: GGG
tgtcttcctgggtttggagg

SEQ ID NO: 11846 - DNA, 20 bp, Artificial Sequence
  Description of Artificial Sequence: Synthetic oligonucleotide
  Target: ANGPTL4; (+) strand; PAM type: NRG; PAM sequence: TGG
tcctgggtttggagggggtt

SEQ ID NO: 11847 - DNA, 20 bp, Artificial Sequence
  Description of Artificial Sequence: Synthetic oligonucleotide
  Target: ANGPTL4; (+) strand; PAM type: NRG; PAM sequence: TGG
tttggagggggtttggtgct

SEQ ID NO: 11848 - DNA, 20 bp, Artificial Sequence
  Description of Artificial Sequence: Synthetic oligonucleotide
  Target: ANGPTL4; (+) strand; PAM type: NRG; PAM sequence: CAG
ggagggggtttggtgcttgg

SEQ ID NO: 11849 - DNA, 20 bp, Artificial Sequence
  Description of Artificial Sequence: Synthetic oligonucleotide
  Target: ANGPTL4; (+) strand; PAM type: NRG; PAM sequence: CAG
ggggtttggtgcttggcagc

SEQ ID NO: 11850 - DNA, 20 bp, Artificial Sequence
  Description of Artificial Sequence: Synthetic oligonucleotide
  Target: ANGPTL4; (+) strand; PAM type: NRG; PAM sequence: GAG
ttggtgcttggcagccagat

SEQ ID NO: 11851 - DNA, 20 bp, Artificial Sequence
  Description of Artificial Sequence: Synthetic oligonucleotide
  Target: ANGPTL4; (+) strand; PAM type: NRG; PAM sequence: AGG
tggtgcttggcagccagatg

SEQ ID NO: 11852 - DNA, 20 bp, Artificial Sequence
  Description of Artificial Sequence: Synthetic oligonucleotide
  Target: ANGPTL4; (+) strand; PAM type: NRG; PAM sequence: GGG
ggtgcttggcagccagatga

SEQ ID NO: 11853 - DNA, 20 bp, Artificial Sequence
  Description of Artificial Sequence: Synthetic oligonucleotide
  Target: ANGPTL4; (+) strand; PAM type: NRG; PAM sequence: GAG
tgcttggcagccagatgagg

SEQ ID NO: 11854 - DNA, 20 bp, Artificial Sequence
  Description of Artificial Sequence: Synthetic oligonucleotide
  Target: ANGPTL4; (+) strand; PAM type: NRG; PAM sequence: TGG
ttggcagccagatgagggag

SEQ ID NO: 11855 - DNA, 20 bp, Artificial Sequence
  Description of Artificial Sequence: Synthetic oligonucleotide
  Target: ANGPTL4; (+) strand; PAM type: NRG; PAM sequence: GGG
tggcagccagatgagggagt

SEQ ID NO: 11856 - DNA, 20 bp, Artificial Sequence
  Description of Artificial Sequence: Synthetic oligonucleotide
  Target: ANGPTL4; (+) strand; PAM type: NRG; PAM sequence: GGG
ggcagccagatgagggagtg

SEQ ID NO: 11857 - DNA, 20 bp, Artificial Sequence
  Description of Artificial Sequence: Synthetic oligonucleotide
  Target: ANGPTL4; (+) strand; PAM type: NRG; PAM sequence: AAG
agggagtggggtcgtctgtg

SEQ ID NO: 11858 - DNA, 20 bp, Artificial Sequence
  Description of Artificial Sequence: Synthetic oligonucleotide
  Target: ANGPTL4; (+) strand; PAM type: NRG; PAM sequence: GAG
ggagtggggtcgtctgtgaa

SEQ ID NO: 11859 - DNA, 20 bp, Artificial Sequence
  Description of Artificial Sequence: Synthetic oligonucleotide
  Target: ANGPTL4; (+) strand; PAM type: NRG; PAM sequence: AGG
gagtggggtcgtctgtgaag

SEQ ID NO: 11860 - DNA, 20 bp, Artificial Sequence
  Description of Artificial Sequence: Synthetic oligonucleotide
  Target: ANGPTL4; (+) strand; PAM type: NRG; PAM sequence: GGG
agtggggtcgtctgtgaaga

SEQ ID NO: 11861 - DNA, 20 bp, Artificial Sequence
  Description of Artificial Sequence: Synthetic oligonucleotide
  Target: ANGPTL4; (+) strand; PAM type: NRG; PAM sequence: TGG
gtctgtgaagagggacttcc

SEQ ID NO: 11862 - DNA, 20 bp, Artificial Sequence
  Description of Artificial Sequence: Synthetic oligonucleotide
  Target: ANGPTL4; (+) strand; PAM type: NRG; PAM sequence: TGG
ctggtgaccttgtacctttc

SEQ ID NO: 11863 - DNA, 20 bp, Artificial Sequence
  Description of Artificial Sequence: Synthetic oligonucleotide
  Target: ANGPTL4; (+) strand; PAM type: NRG; PAM sequence: GGG
tggtgaccttgtacctttct

SEQ ID NO: 11864 - DNA, 20 bp, Artificial Sequence
  Description of Artificial Sequence: Synthetic oligonucleotide
  Target: ANGPTL4; (+) strand; PAM type: NRG; PAM sequence: CAG
tgaccttgtacctttctggg

SEQ ID NO: 11865 - DNA, 20 bp, Artificial Sequence
  Description of Artificial Sequence: Synthetic oligonucleotide
  Target: ANGPTL4; (+) strand; PAM type: NRG; PAM sequence: TGG
cttgtacctttctgggcaga

SEQ ID NO: 11866 - DNA, 20 bp, Artificial Sequence
  Description of Artificial Sequence: Synthetic oligonucleotide
  Target: ANGPTL4; (+) strand; PAM type: NRG; PAM sequence: GAG
tgtacctttctgggcagatg

SEQ ID NO: 11867 - DNA, 20 bp, Artificial Sequence
  Description of Artificial Sequence: Synthetic oligonucleotide
  Target: ANGPTL4; (+) strand; PAM type: NRG; PAM sequence: AGG
gtacctttctgggcagatgg

SEQ ID NO: 11868 - DNA, 20 bp, Artificial Sequence
  Description of Artificial Sequence: Synthetic oligonucleotide
  Target: ANGPTL4; (+) strand; PAM type: NRG; PAM sequence: TGG
ctttctgggcagatggaggc

SEQ ID NO: 11869 - DNA, 20 bp, Artificial Sequence
  Description of Artificial Sequence: Synthetic oligonucleotide
  Target: ANGPTL4; (+) strand; PAM type: NRG; PAM sequence: CAG
ctgggcagatggaggctgga

SEQ ID NO: 11870 - DNA, 20 bp, Artificial Sequence
  Description of Artificial Sequence: Synthetic oligonucleotide
  Target: ANGPTL4; (+) strand; PAM type: NRG; PAM sequence: CAG
atggaggctggacagtaatt

SEQ ID NO: 11871 - DNA, 20 bp, Artificial Sequence
  Description of Artificial Sequence: Synthetic oligonucleotide
  Target: ANGPTL4; (+) strand; PAM type: NRG; PAM sequence: GAG
ggaggctggacagtaattca

SEQ ID NO: 11872 - DNA, 20 bp, Artificial Sequence
  Description of Artificial Sequence: Synthetic oligonucleotide
  Target: ANGPTL4; (+) strand; PAM type: NRG; PAM sequence: AGG
gaggctggacagtaattcag

SEQ ID NO: 11873 - DNA, 20 bp, Artificial Sequence
  Description of Artificial Sequence: Synthetic oligonucleotide
  Target: ANGPTL4; (+) strand; PAM type: NRG; PAM sequence: TGG
gtaattcagaggcgccacga

SEQ ID NO: 11874 - DNA, 20 bp, Artificial Sequence
  Description of Artificial Sequence: Synthetic oligonucleotide
  Target: ANGPTL4; (+) strand; PAM type: NRG; PAM sequence: CAG
tcagaggcgccacgatggct

SEQ ID NO: 11875 - DNA, 20 bp, Artificial Sequence
  Description of Artificial Sequence: Synthetic oligonucleotide
  Target: ANGPTL4; (+) strand; PAM type: NRG; PAM sequence: TGG
gaggcgccacgatggctcag

SEQ ID NO: 11876 - DNA, 20 bp, Artificial Sequence
  Description of Artificial Sequence: Synthetic oligonucleotide
  Target: ANGPTL4; (+) strand; PAM type: NRG; PAM sequence: CGG
atggctcagtggacttcaac

SEQ ID NO: 11877 - DNA, 20 bp, Artificial Sequence
  Description of Artificial Sequence: Synthetic oligonucleotide
  Target: ANGPTL4; (+) strand; PAM type: NRG; PAM sequence: TGG
cagtggacttcaaccggccc

SEQ ID NO: 11878 - DNA, 20 bp, Artificial Sequence
  Description of Artificial Sequence: Synthetic oligonucleotide
  Target: ANGPTL4; (+) strand; PAM type: NRG; PAM sequence: GGG
agtggacttcaaccggccct

SEQ ID NO: 11879 - DNA, 20 bp, Artificial Sequence
  Description of Artificial Sequence: Synthetic oligonucleotide
  Target: ANGPTL4; (+) strand; PAM type: NRG; PAM sequence: AAG
ggacttcaaccggccctggg

SEQ ID NO: 11880 - DNA, 20 bp, Artificial Sequence
  Description of Artificial Sequence: Synthetic oligonucleotide
  Target: ANGPTL4; (+) strand; PAM type: NRG; PAM sequence: AAG
accggccctgggaagcctac

SEQ ID NO: 11881 - DNA, 20 bp, Artificial Sequence
  Description of Artificial Sequence: Synthetic oligonucleotide
  Target: ANGPTL4; (+) strand; PAM type: NRG; PAM sequence: AGG
ccggccctgggaagcctaca

SEQ ID NO: 11882 - DNA, 20 bp, Artificial Sequence
  Description of Artificial Sequence: Synthetic oligonucleotide
  Target: ANGPTL4; (+) strand; PAM type: NRG; PAM sequence: CGG
gccctgggaagcctacaagg

SEQ ID NO: 11883 - DNA, 20 bp, Artificial Sequence
  Description of Artificial Sequence: Synthetic oligonucleotide
  Target: ANGPTL4; (+) strand; PAM type: NRG; PAM sequence: GGG
ccctgggaagcctacaaggc

SEQ ID NO: 11884 - DNA, 20 bp, Artificial Sequence
  Description of Artificial Sequence: Synthetic oligonucleotide
  Target: ANGPTL4; (+) strand; PAM type: NRG; PAM sequence: GGG
cctgggaagcctacaaggcg

SEQ ID NO: 11885 - DNA, 20 bp, Artificial Sequence
  Description of Artificial Sequence: Synthetic oligonucleotide
  Target: ANGPTL4; (+) strand; PAM type: NRG; PAM sequence: TGG
gaagcctacaaggcggggtt

SEQ ID NO: 11886 - DNA, 20 bp, Artificial Sequence
  Description of Artificial Sequence: Synthetic oligonucleotide
  Target: ANGPTL4; (+) strand; PAM type: NRG; PAM sequence: GGG
aagcctacaaggcggggttt

SEQ ID NO: 11887 - DNA, 20 bp, Artificial Sequence
  Description of Artificial Sequence: Synthetic oligonucleotide
  Target: ANGPTL4; (+) strand; PAM type: NRG; PAM sequence: GGG
agcctacaaggcggggtttg

SEQ ID NO: 11888 - DNA, 20 bp, Artificial Sequence
  Description of Artificial Sequence: Synthetic oligonucleotide
  Target: ANGPTL4; (+) strand; PAM type: NRG; PAM sequence: CGG
gcggggtttggggatcccca

SEQ ID NO: 11889 - DNA, 20 bp, Artificial Sequence
  Description of Artificial Sequence: Synthetic oligonucleotide
  Target: ANGPTL4; (+) strand; PAM type: NRG; PAM sequence: TAG
gggtttggggatccccacgg

SEQ ID NO: 11890 - DNA, 20 bp, Artificial Sequence
  Description of Artificial Sequence: Synthetic oligonucleotide
  Target: ANGPTL4; (+) strand; PAM type: NRG; PAM sequence: AGG
ggtttggggatccccacggt

SEQ ID NO: 11891 - DNA, 20 bp, Artificial Sequence
  Description of Artificial Sequence: Synthetic oligonucleotide
  Target: ANGPTL4; (+) strand; PAM type: NRG; PAM sequence: TAG
atccccacggtaggtgtttc

SEQ ID NO: 11892 - DNA, 20 bp, Artificial Sequence
  Description of Artificial Sequence: Synthetic oligonucleotide
  Target: ANGPTL4; (+) strand; PAM type: NRG; PAM sequence: TGG
cccacggtaggtgtttctag

SEQ ID NO: 11893 - DNA, 20 bp, Artificial Sequence
  Description of Artificial Sequence: Synthetic oligonucleotide
  Target: ANGPTL4; (+) strand; PAM type: NRG; PAM sequence: GGG
ccacggtaggtgtttctagt

SEQ ID NO: 11894 - DNA, 20 bp, Artificial Sequence
  Description of Artificial Sequence: Synthetic oligonucleotide
  Target: ANGPTL4; (+) strand; PAM type: NRG; PAM sequence: GGG
cacggtaggtgtttctagtg

SEQ ID NO: 11895 - DNA, 20 bp, Artificial Sequence
  Description of Artificial Sequence: Synthetic oligonucleotide
  Target: ANGPTL4; (+) strand; PAM type: NRG; PAM sequence: CAG
gtaggtgtttctagtgggga

SEQ ID NO: 11896 - DNA, 20 bp, Artificial Sequence
  Description of Artificial Sequence: Synthetic oligonucleotide
  Target: ANGPTL4; (+) strand; PAM type: NRG; PAM sequence: GAG
aggtgtttctagtggggaca

SEQ ID NO: 11897 - DNA, 20 bp, Artificial Sequence
  Description of Artificial Sequence: Synthetic oligonucleotide
  Target: ANGPTL4; (+) strand; PAM type: NRG; PAM sequence: AGG
ggtgtttctagtggggacag

SEQ ID NO: 11898 - DNA, 20 bp, Artificial Sequence
  Description of Artificial Sequence: Synthetic oligonucleotide
  Target: ANGPTL4; (+) strand; PAM type: NRG; PAM sequence: CAG
gtttctagtggggacagagg

SEQ ID NO: 11899 - DNA, 20 bp, Artificial Sequence
  Description of Artificial Sequence: Synthetic oligonucleotide
  Target: ANGPTL4; (+) strand; PAM type: NRG; PAM sequence: AGG
tttctagtggggacagaggc

SEQ ID NO: 11900 - DNA, 20 bp, Artificial Sequence
  Description of Artificial Sequence: Synthetic oligonucleotide
  Target: ANGPTL4; (+) strand; PAM type: NRG; PAM sequence: GGG
ttctagtggggacagaggca

SEQ ID NO: 11901 - DNA, 20 bp, Artificial Sequence
  Description of Artificial Sequence: Synthetic oligonucleotide
  Target: ANGPTL4; (+) strand; PAM type: NRG; PAM sequence: GGG
tctagtggggacagaggcag

SEQ ID NO: 11902 - DNA, 20 bp, Artificial Sequence
  Description of Artificial Sequence: Synthetic oligonucleotide
  Target: ANGPTL4; (+) strand; PAM type: NRG; PAM sequence: GAG
tagtggggacagaggcaggg

SEQ ID NO: 11903 - DNA, 20 bp, Artificial Sequence
  Description of Artificial Sequence: Synthetic oligonucleotide
  Target: ANGPTL4; (+) strand; PAM type: NRG; PAM sequence: AGG
agtggggacagaggcagggg

SEQ ID NO: 11904 - DNA, 20 bp, Artificial Sequence
  Description of Artificial Sequence: Synthetic oligonucleotide
  Target: ANGPTL4; (+) strand; PAM type: NRG; PAM sequence: AAG
ggggacagaggcaggggagg

SEQ ID NO: 11905 - DNA, 20 bp, Artificial Sequence
  Description of Artificial Sequence: Synthetic oligonucleotide
  Target: ANGPTL4; (+) strand; PAM type: NRG; PAM sequence: GAG
ggacagaggcaggggaggaa

SEQ ID NO: 11906 - DNA, 20 bp, Artificial Sequence
  Description of Artificial Sequence: Synthetic oligonucleotide
  Target: ANGPTL4; (+) strand; PAM type: NRG; PAM sequence: AGG
gacagaggcaggggaggaag

SEQ ID NO: 11907 - DNA, 20 bp, Artificial Sequence
  Description of Artificial Sequence: Synthetic oligonucleotide
  Target: ANGPTL4; (+) strand; PAM type: NRG; PAM sequence: GGG
acagaggcaggggaggaaga

SEQ ID NO: 11908 - DNA, 20 bp, Artificial Sequence
  Description of Artificial Sequence: Synthetic oligonucleotide
  Target: ANGPTL4; (+) strand; PAM type: NRG; PAM sequence: CAG
aggggaggaagagggaccct

SEQ ID NO: 11909 - DNA, 20 bp, Artificial Sequence
  Description of Artificial Sequence: Synthetic oligonucleotide
  Target: ANGPTL4; (+) strand; PAM type: NRG; PAM sequence: AAG
ggaggaagagggaccctcag

SEQ ID NO: 11910 - DNA, 20 bp, Artificial Sequence
  Description of Artificial Sequence: Synthetic oligonucleotide
  Target: ANGPTL4; (+) strand; PAM type: NRG; PAM sequence: TGG
ggaagagggaccctcagaag

SEQ ID NO: 11911 - DNA, 20 bp, Artificial Sequence
  Description of Artificial Sequence: Synthetic oligonucleotide
  Target: ANGPTL4; (+) strand; PAM type: NRG; PAM sequence: TGG
tcagaagtggccctgcctca

SEQ ID NO: 11912 - DNA, 20 bp, Artificial Sequence
  Description of Artificial Sequence: Synthetic oligonucleotide
  Target: ANGPTL4; (+) strand; PAM type: NRG; PAM sequence: GAG
agaagtggccctgcctcatg

SEQ ID NO: 11913 - DNA, 20 bp, Artificial Sequence
  Description of Artificial Sequence: Synthetic oligonucleotide
  Target: ANGPTL4; (+) strand; PAM type: NRG; PAM sequence: TGG
agtggccctgcctcatggag

SEQ ID NO: 11914 - DNA, 20 bp, Artificial Sequence
  Description of Artificial Sequence: Synthetic oligonucleotide
  Target: ANGPTL4; (+) strand; PAM type: NRG; PAM sequence: CAG
tggagtggcctctcccactc

SEQ ID NO: 11915 - DNA, 20 bp, Artificial Sequence
  Description of Artificial Sequence: Synthetic oligonucleotide
  Target: ANGPTL4; (+) strand; PAM type: NRG; PAM sequence: AGG
ggagtggcctctcccactcc

SEQ ID NO: 11916 - DNA, 20 bp, Artificial Sequence
  Description of Artificial Sequence: Synthetic oligonucleotide
  Target: ANGPTL4; (+) strand; PAM type: NRG; PAM sequence: GAG
tggcctctcccactccaggc

SEQ ID NO: 11917 - DNA, 20 bp, Artificial Sequence
  Description of Artificial Sequence: Synthetic oligonucleotide
  Target: ANGPTL4; (+) strand; PAM type: NRG; PAM sequence: TGG
ctcccactccaggcgagttc

SEQ ID NO: 11918 - DNA, 20 bp, Artificial Sequence
  Description of Artificial Sequence: Synthetic oligonucleotide
  Target: ANGPTL4; (+) strand; PAM type: NRG; PAM sequence: TGG
cactccaggcgagttctggc

SEQ ID NO: 11919 - DNA, 20 bp, Artificial Sequence
  Description of Artificial Sequence: Synthetic oligonucleotide
  Target: ANGPTL4; (+) strand; PAM type: NRG; PAM sequence: GGG
actccaggcgagttctggct

SEQ ID NO: 11920 - DNA, 20 bp, Artificial Sequence
  Description of Artificial Sequence: Synthetic oligonucleotide
  Target: ANGPTL4; (+) strand; PAM type: NRG; PAM sequence: TGG
aggcgagttctggctgggtc

SEQ ID NO: 11921 - DNA, 20 bp, Artificial Sequence
  Description of Artificial Sequence: Synthetic oligonucleotide
  Target: ANGPTL4; (+) strand; PAM type: NRG; PAM sequence: GAG
gcgagttctggctgggtctg

SEQ ID NO: 11922 - DNA, 20 bp, Artificial Sequence
  Description of Artificial Sequence: Synthetic oligonucleotide
  Target: ANGPTL4; (+) strand; PAM type: NRG; PAM sequence: AAG
agttctggctgggtctggag

SEQ ID NO: 11923 - DNA, 20 bp, Artificial Sequence
  Description of Artificial Sequence: Synthetic oligonucleotide
  Target: ANGPTL4; (+) strand; PAM type: NRG; PAM sequence: AGG
gttctggctgggtctggaga

SEQ ID NO: 11924 - DNA, 20 bp, Artificial Sequence
  Description of Artificial Sequence: Synthetic oligonucleotide
  Target: ANGPTL4; (+) strand; PAM type: NRG; PAM sequence: TAG
ctgggtctggagaaggtgca

SEQ ID NO: 11925 - DNA, 20 bp, Artificial Sequence
  Description of Artificial Sequence: Synthetic oligonucleotide
  Target: ANGPTL4; (+) strand; PAM type: NRG; PAM sequence: CGG
ggagaaggtgcatagcatca

SEQ ID NO: 11926 - DNA, 20 bp, Artificial Sequence
  Description of Artificial Sequence: Synthetic oligonucleotide
  Target: ANGPTL4; (+) strand; PAM type: NRG; PAM sequence: GGG
gagaaggtgcatagcatcac

SEQ ID NO: 11927 - DNA, 20 bp, Artificial Sequence
  Description of Artificial Sequence: Synthetic oligonucleotide
  Target: ANGPTL4; (+) strand; PAM type: NRG; PAM sequence: GGG
agaaggtgcatagcatcacg

SEQ ID NO: 11928 - DNA, 20 bp, Artificial Sequence
  Description of Artificial Sequence: Synthetic oligonucleotide
  Target: ANGPTL4; (+) strand; PAM type: NRG; PAM sequence: GGG
gaaggtgcatagcatcacgg

SEQ ID NO: 11929 - DNA, 20 bp, Artificial Sequence
  Description of Artificial Sequence: Synthetic oligonucleotide
  Target: ANGPTL4; (+) strand; PAM type: NRG; PAM sequence: CAG
agcatcacgggggaccgcaa

SEQ ID NO: 11930 - DNA, 20 bp, Artificial Sequence
  Description of Artificial Sequence: Synthetic oligonucleotide
  Target: ANGPTL4; (+) strand; PAM type: NRG; PAM sequence: TGG
gggggaccgcaacagccgcc

SEQ ID NO: 11931 - DNA, 20 bp, Artificial Sequence
  Description of Artificial Sequence: Synthetic oligonucleotide
  Target: ANGPTL4; (+) strand; PAM type: NRG; PAM sequence: CAG
gcaacagccgcctggccgtg

SEQ ID NO: 11932 - DNA, 20 bp, Artificial Sequence
  Description of Artificial Sequence: Synthetic oligonucleotide
  Target: ANGPTL4; (+) strand; PAM type: NRG; PAM sequence: CGG
gccgcctggccgtgcagctg

SEQ ID NO: 11933 - DNA, 20 bp, Artificial Sequence
  Description of Artificial Sequence: Synthetic oligonucleotide
  Target: ANGPTL4; (+) strand; PAM type: NRG; PAM sequence: GGG
ccgcctggccgtgcagctgc

SEQ ID NO: 11934 - DNA, 20 bp, Artificial Sequence
  Description of Artificial Sequence: Synthetic oligonucleotide
  Target: ANGPTL4; (+) strand; PAM type: NRG; PAM sequence: TGG
tggccgtgcagctgcgggac

SEQ ID NO: 11935 - DNA, 20 bp, Artificial Sequence
  Description of Artificial Sequence: Synthetic oligonucleotide
  Target: ANGPTL4; (+) strand; PAM type: NRG; PAM sequence: GGG
ggccgtgcagctgcgggact

SEQ ID NO: 11936 - DNA, 20 bp, Artificial Sequence
  Description of Artificial Sequence: Synthetic oligonucleotide
  Target: ANGPTL4; (+) strand; PAM type: NRG; PAM sequence: TGG
gtgcagctgcgggactggga

SEQ ID NO: 11937 - DNA, 20 bp, Artificial Sequence
  Description of Artificial Sequence: Synthetic oligonucleotide
  Target: ANGPTL4; (+) strand; PAM type: NRG; PAM sequence: GAG
gggactgggatggcaacgcc

SEQ ID NO: 11938 - DNA, 20 bp, Artificial Sequence
  Description of Artificial Sequence: Synthetic oligonucleotide
  Target: ANGPTL4; (+) strand; PAM type: NRG; PAM sequence: CAG
atggcaacgccgagttgctg

SEQ ID NO: 11939 - DNA, 20 bp, Artificial Sequence
  Description of Artificial Sequence: Synthetic oligonucleotide
  Target: ANGPTL4; (+) strand; PAM type: NRG; PAM sequence: TGG
gctgcagttctccgtgcacc

SEQ ID NO: 11940 - DNA, 20 bp, Artificial Sequence
  Description of Artificial Sequence: Synthetic oligonucleotide
  Target: ANGPTL4; (+) strand; PAM type: NRG; PAM sequence: GGG
ctgcagttctccgtgcacct

SEQ ID NO: 11941 - DNA, 20 bp, Artificial Sequence
  Description of Artificial Sequence: Synthetic oligonucleotide
  Target: ANGPTL4; (+) strand; PAM type: NRG; PAM sequence: TGG
cagttctccgtgcacctggg

SEQ ID NO: 11942 - DNA, 20 bp, Artificial Sequence
  Description of Artificial Sequence: Synthetic oligonucleotide
  Target: ANGPTL4; (+) strand; PAM type: NRG; PAM sequence: GAG
tctccgtgcacctgggtggc

SEQ ID NO: 11943 - DNA, 20 bp, Artificial Sequence
  Description of Artificial Sequence: Synthetic oligonucleotide
  Target: ANGPTL4; (+) strand; PAM type: NRG; PAM sequence: AGG
ctccgtgcacctgggtggcg

SEQ ID NO: 11944 - DNA, 20 bp, Artificial Sequence
  Description of Artificial Sequence: Synthetic oligonucleotide
  Target: ANGPTL4; (+) strand; PAM type: NRG; PAM sequence: CGG
gcacctgggtggcgaggaca

SEQ ID NO: 11945 - DNA, 20 bp, Artificial Sequence
  Description of Artificial Sequence: Synthetic oligonucleotide
  Target: ANGPTL4; (+) strand; PAM type: NRG; PAM sequence: TAG
ggtggcgaggacacggccta

SEQ ID NO: 11946 - DNA, 20 bp, Artificial Sequence
  Description of Artificial Sequence: Synthetic oligonucleotide
  Target: ANGPTL4; (+) strand; PAM type: NRG; PAM sequence: CAG
aggacacggcctatagcctg

SEQ ID NO: 11947 - DNA, 20 bp, Artificial Sequence
  Description of Artificial Sequence: Synthetic oligonucleotide
  Target: ANGPTL4; (+) strand; PAM type: NRG; PAM sequence: TGG
cctgcagctcactgcacccg

SEQ ID NO: 11948 - DNA, 20 bp, Artificial Sequence
  Description of Artificial Sequence: Synthetic oligonucleotide
  Target: ANGPTL4; (+) strand; PAM type: NRG; PAM sequence: CGG
cagctcactgcacccgtggc

SEQ ID NO: 11949 - DNA, 20 bp, Artificial Sequence
  Description of Artificial Sequence: Synthetic oligonucleotide
  Target: ANGPTL4; (+) strand; PAM type: NRG; PAM sequence: CAG
tcactgcacccgtggccggc

SEQ ID NO: 11950 - DNA, 20 bp, Artificial Sequence
  Description of Artificial Sequence: Synthetic oligonucleotide
  Target: ANGPTL4; (+) strand; PAM type: NRG; PAM sequence: TGG
tgcacccgtggccggccagc

SEQ ID NO: 11951 - DNA, 20 bp, Artificial Sequence
  Description of Artificial Sequence: Synthetic oligonucleotide
  Target: ANGPTL4; (+) strand; PAM type: NRG; PAM sequence: GGG
gcacccgtggccggccagct

SEQ ID NO: 11952 - DNA, 20 bp, Artificial Sequence
  Description of Artificial Sequence: Synthetic oligonucleotide
  Target: ANGPTL4; (+) strand; PAM type: NRG; PAM sequence: CAG
ggcgccaccaccgtcccacc

SEQ ID NO: 11953 - DNA, 20 bp, Artificial Sequence
  Description of Artificial Sequence: Synthetic oligonucleotide
  Target: ANGPTL4; (+) strand; PAM type: NRG; PAM sequence: CGG
gccaccaccgtcccacccag

SEQ ID NO: 11954 - DNA, 20 bp, Artificial Sequence
  Description of Artificial Sequence: Synthetic oligonucleotide
  Target: ANGPTL4; (+) strand; PAM type: NRG; PAM sequence: TGG
tctccgtacccttctccact

SEQ ID NO: 11955 - DNA, 20 bp, Artificial Sequence
  Description of Artificial Sequence: Synthetic oligonucleotide
  Target: ANGPTL4; (+) strand; PAM type: NRG; PAM sequence: GGG
ctccgtacccttctccactt

SEQ ID NO: 11956 - DNA, 20 bp, Artificial Sequence
  Description of Artificial Sequence: Synthetic oligonucleotide
  Target: ANGPTL4; (+) strand; PAM type: NRG; PAM sequence: CAG
tacccttctccacttgggac

SEQ ID NO: 11957 - DNA, 20 bp, Artificial Sequence
  Description of Artificial Sequence: Synthetic oligonucleotide
  Target: ANGPTL4; (+) strand; PAM type: NRG; PAM sequence: AGG
acccttctccacttgggacc

SEQ ID NO: 11958 - DNA, 20 bp, Artificial Sequence
  Description of Artificial Sequence: Synthetic oligonucleotide
  Target: ANGPTL4; (+) strand; PAM type: NRG; PAM sequence: CAG
gaccaggatcacgacctccg

SEQ ID NO: 11959 - DNA, 20 bp, Artificial Sequence
  Description of Artificial Sequence: Synthetic oligonucleotide
  Target: ANGPTL4; (+) strand; PAM type: NRG; PAM sequence: AGG
accaggatcacgacctccgc

SEQ ID NO: 11960 - DNA, 20 bp, Artificial Sequence
  Description of Artificial Sequence: Synthetic oligonucleotide
  Target: ANGPTL4; (+) strand; PAM type: NRG; PAM sequence: GGG
ccaggatcacgacctccgca

SEQ ID NO: 11961 - DNA, 20 bp, Artificial Sequence
  Description of Artificial Sequence: Synthetic oligonucleotide
  Target: ANGPTL4; (+) strand; PAM type: NRG; PAM sequence: AAG
atcacgacctccgcagggac

SEQ ID NO: 11962 - DNA, 20 bp, Artificial Sequence
  Description of Artificial Sequence: Synthetic oligonucleotide
  Target: ANGPTL4; (+) strand; PAM type: NRG; PAM sequence: AAG
gcagggacaagaactgcgcc

SEQ ID NO: 11963 - DNA, 20 bp, Artificial Sequence
  Description of Artificial Sequence: Synthetic oligonucleotide
  Target: ANGPTL4; (+) strand; PAM type: NRG; PAM sequence: GAG
agggacaagaactgcgccaa

SEQ ID NO: 11964 - DNA, 20 bp, Artificial Sequence
  Description of Artificial Sequence: Synthetic oligonucleotide
  Target: ANGPTL4; (+) strand; PAM type: NRG; PAM sequence: TGG
aactgcgccaagagcctctc

SEQ ID NO: 11965 - DNA, 20 bp, Artificial Sequence
  Description of Artificial Sequence: Synthetic oligonucleotide
  Target: ANGPTL4; (+) strand; PAM type: NRG; PAM sequence: GAG
gcgccaagagcctctctggt

SEQ ID NO: 11966 - DNA, 20 bp, Artificial Sequence
  Description of Artificial Sequence: Synthetic oligonucleotide
  Target: ANGPTL4; (+) strand; PAM type: NRG; PAM sequence: CAG
ccaagagcctctctggtgag

SEQ ID NO: 11967 - DNA, 20 bp, Artificial Sequence
  Description of Artificial Sequence: Synthetic oligonucleotide
  Target: ANGPTL4; (+) strand; PAM type: NRG; PAM sequence: AGG
caagagcctctctggtgagc

SEQ ID NO: 11968 - DNA, 20 bp, Artificial Sequence
  Description of Artificial Sequence: Synthetic oligonucleotide
  Target: ANGPTL4; (+) strand; PAM type: NRG; PAM sequence: CAG
aggccctgccatgccacacc

SEQ ID NO: 11969 - DNA, 20 bp, Artificial Sequence
  Description of Artificial Sequence: Synthetic oligonucleotide
  Target: ANGPTL4; (+) strand; PAM type: NRG; PAM sequence: CAG
cctgccatgccacacccagc

SEQ ID NO: 11970 - DNA, 20 bp, Artificial Sequence
  Description of Artificial Sequence: Synthetic oligonucleotide
  Target: ANGPTL4; (+) strand; PAM type: NRG; PAM sequence: CAG
gccatgccacacccagccag

SEQ ID NO: 11971 - DNA, 20 bp, Artificial Sequence
  Description of Artificial Sequence: Synthetic oligonucleotide
  Target: ANGPTL4; (+) strand; PAM type: NRG; PAM sequence: TGG
ttacatgccgtgtgtgtgat

SEQ ID NO: 11972 - DNA, 20 bp, Artificial Sequence
  Description of Artificial Sequence: Synthetic oligonucleotide
  Target: ANGPTL4; (+) strand; PAM type: NRG; PAM sequence: GGG
tacatgccgtgtgtgtgatt

SEQ ID NO: 11973 - DNA, 20 bp, Artificial Sequence
  Description of Artificial Sequence: Synthetic oligonucleotide
  Target: ANGPTL4; (+) strand; PAM type: NRG; PAM sequence: TAG
gtgtgattgggccactaact

SEQ ID NO: 11974 - DNA, 20 bp, Artificial Sequence
  Description of Artificial Sequence: Synthetic oligonucleotide
  Target: ANGPTL4; (+) strand; PAM type: NRG; PAM sequence: TGG
ggccactaacttagcctatc

SEQ ID NO: 11975 - DNA, 20 bp, Artificial Sequence
  Description of Artificial Sequence: Synthetic oligonucleotide
  Target: ANGPTL4; (+) strand; PAM type: NRG; PAM sequence: CAG
taacttagcctatctggcct

SEQ ID NO: 11976 - DNA, 20 bp, Artificial Sequence
  Description of Artificial Sequence: Synthetic oligonucleotide
  Target: ANGPTL4; (+) strand; PAM type: NRG; PAM sequence: AAG
ctcagttttcccatcctgaa

SEQ ID NO: 11977 - DNA, 20 bp, Artificial Sequence
  Description of Artificial Sequence: Synthetic oligonucleotide
  Target: ANGPTL4; (+) strand; PAM type: NRG; PAM sequence: AGG
tcagttttcccatcctgaaa

SEQ ID NO: 11978 - DNA, 20 bp, Artificial Sequence
  Description of Artificial Sequence: Synthetic oligonucleotide
  Target: ANGPTL4; (+) strand; PAM type: NRG; PAM sequence: GGG
cagttttcccatcctgaaaa

SEQ ID NO: 11979 - DNA, 20 bp, Artificial Sequence
  Description of Artificial Sequence: Synthetic oligonucleotide
  Target: ANGPTL4; (+) strand; PAM type: NRG; PAM sequence: GAG
tatttatgtatttatttttt

SEQ ID NO: 11980 - DNA, 20 bp, Artificial Sequence
  Description of Artificial Sequence: Synthetic oligonucleotide
  Target: ANGPTL4; (+) strand; PAM type: NRG; PAM sequence: CGG
tatgtatttattttttgaga

SEQ ID NO: 11981 - DNA, 20 bp, Artificial Sequence
  Description of Artificial Sequence: Synthetic oligonucleotide
  Target: ANGPTL4; (+) strand; PAM type: NRG; PAM sequence: GAG
tgtatttattttttgagacg

SEQ ID NO: 11982 - DNA, 20 bp, Artificial Sequence
  Description of Artificial Sequence: Synthetic oligonucleotide
  Target: ANGPTL4; (+) strand; PAM type: NRG; PAM sequence: CAG
cggagtctcactttgtcacc

SEQ ID NO: 11983 - DNA, 20 bp, Artificial Sequence
  Description of Artificial Sequence: Synthetic oligonucleotide
  Target: ANGPTL4; (+) strand; PAM type: NRG; PAM sequence: AGG
ggagtctcactttgtcaccc

SEQ ID NO: 11984 - DNA, 20 bp, Artificial Sequence
  Description of Artificial Sequence: Synthetic oligonucleotide
  Target: ANGPTL4; (+) strand; PAM type: NRG; PAM sequence: TGG
tctcactttgtcacccaggc

SEQ ID NO: 11985 - DNA, 20 bp, Artificial Sequence
  Description of Artificial Sequence: Synthetic oligonucleotide
  Target: ANGPTL4; (+) strand; PAM type: NRG; PAM sequence: GAG
tcactttgtcacccaggctg

SEQ ID NO: 11986 - DNA, 20 bp, Artificial Sequence
  Description of Artificial Sequence: Synthetic oligonucleotide
  Target: ANGPTL4; (+) strand; PAM type: NRG; PAM sequence: TGG
acccaggctggagtgctttg

SEQ ID NO: 11987 - DNA, 20 bp, Artificial Sequence
  Description of Artificial Sequence: Synthetic oligonucleotide
  Target: ANGPTL4; (+) strand; PAM type: NRG; PAM sequence: TGG
agtgctttgtggcacgatct

SEQ ID NO: 11988 - DNA, 20 bp, Artificial Sequence
  Description of Artificial Sequence: Synthetic oligonucleotide
  Target: ANGPTL4; (+) strand; PAM type: NRG; PAM sequence: AAG
gcacgatcttggctcactgc

SEQ ID NO: 11989 - DNA, 20 bp, Artificial Sequence
  Description of Artificial Sequence: Synthetic oligonucleotide
  Target: ANGPTL4; (+) strand; PAM type: NRG; PAM sequence: GAG
cactgcaagctccacctcct

SEQ ID NO: 11990 - DNA, 20 bp, Artificial Sequence
  Description of Artificial Sequence: Synthetic oligonucleotide
  Target: ANGPTL4; (+) strand; PAM type: NRG; PAM sequence: CAG
ttcacaccattctcctgcct

SEQ ID NO: 11991 - DNA, 20 bp, Artificial Sequence
  Description of Artificial Sequence: Synthetic oligonucleotide
  Target: ANGPTL4; (+) strand; PAM type: NRG; PAM sequence: GAG
ttctcctgcctcagcctccc

SEQ ID NO: 11992 - DNA, 20 bp, Artificial Sequence
  Description of Artificial Sequence: Synthetic oligonucleotide
  Target: ANGPTL4; (+) strand; PAM type: NRG; PAM sequence: TAG
tcctgcctcagcctcccgag

SEQ ID NO: 11993 - DNA, 20 bp, Artificial Sequence
  Description of Artificial Sequence: Synthetic oligonucleotide
  Target: ANGPTL4; (+) strand; PAM type: NRG; PAM sequence: TGG
gcctcagcctcccgagtagc

SEQ ID NO: 11994 - DNA, 20 bp, Artificial Sequence
  Description of Artificial Sequence: Synthetic oligonucleotide
  Target: ANGPTL4; (+) strand; PAM type: NRG; PAM sequence: GGG
cctcagcctcccgagtagct

SEQ ID NO: 11995 - DNA, 20 bp, Artificial Sequence
  Description of Artificial Sequence: Synthetic oligonucleotide
  Target: ANGPTL4; (+) strand; PAM type: NRG; PAM sequence: TAG
ctcccgagtagctgggacta

SEQ ID NO: 11996 - DNA, 20 bp, Artificial Sequence
  Description of Artificial Sequence: Synthetic oligonucleotide
  Target: ANGPTL4; (+) strand; PAM type: NRG; PAM sequence: AGG
tcccgagtagctgggactat

SEQ ID NO: 11997 - DNA, 20 bp, Artificial Sequence
  Description of Artificial Sequence: Synthetic oligonucleotide
  Target: ANGPTL4; (+) strand; PAM type: NRG; PAM sequence: TGG
taggtgcccaccaccacgcc

SEQ ID NO: 11998 - DNA, 20 bp, Artificial Sequence
  Description of Artificial Sequence: Synthetic oligonucleotide
  Target: ANGPTL4; (+) strand; PAM type: NRG; PAM sequence: TAG
ggctaatttttttgtatttt

SEQ ID NO: 11999 - DNA, 20 bp, Artificial Sequence
  Description of Artificial Sequence: Synthetic oligonucleotide
  Target: ANGPTL4; (+) strand; PAM type: NRG; PAM sequence: TAG
taatttttttgtatttttag

SEQ ID NO: 12000 - DNA, 20 bp, Artificial Sequence
  Description of Artificial Sequence: Synthetic oligonucleotide
  Target: ANGPTL4; (+) strand; PAM type: NRG; PAM sequence: GAG
atttttttgtatttttagta

SEQ ID NO: 12001 - DNA, 20 bp, Artificial Sequence
  Description of Artificial Sequence: Synthetic oligonucleotide
  Target: ANGPTL4; (+) strand; PAM type: NRG; PAM sequence: TGG
ttttgtatttttagtagaga

SEQ ID NO: 12002 - DNA, 20 bp, Artificial Sequence
  Description of Artificial Sequence: Synthetic oligonucleotide
  Target: ANGPTL4; (+) strand; PAM type: NRG; PAM sequence: GGG
tttgtatttttagtagagat

SEQ ID NO: 12003 - DNA, 20 bp, Artificial Sequence
  Description of Artificial Sequence: Synthetic oligonucleotide
  Target: ANGPTL4; (+) strand; PAM type: NRG; PAM sequence: GGG
ttgtatttttagtagagatg

SEQ ID NO: 12004 - DNA, 20 bp, Artificial Sequence
  Description of Artificial Sequence: Synthetic oligonucleotide
  Target: ANGPTL4; (+) strand; PAM type: NRG; PAM sequence: TAG
gagatggggtttcaccgtgt

SEQ ID NO: 12005 - DNA, 20 bp, Artificial Sequence
  Description of Artificial Sequence: Synthetic oligonucleotide
  Target: ANGPTL4; (+) strand; PAM type: NRG; PAM sequence: CAG
tggggtttcaccgtgttagc

SEQ ID NO: 12006 - DNA, 20 bp, Artificial Sequence
  Description of Artificial Sequence: Synthetic oligonucleotide
  Target: ANGPTL4; (+) strand; PAM type: NRG; PAM sequence: AGG
ggggtttcaccgtgttagcc

SEQ ID NO: 12007 - DNA, 20 bp, Artificial Sequence
  Description of Artificial Sequence: Synthetic oligonucleotide
  Target: ANGPTL4; (+) strand; PAM type: NRG; PAM sequence: TGG
tttcaccgtgttagccagga

SEQ ID NO: 12008 - DNA, 20 bp, Artificial Sequence
  Description of Artificial Sequence: Synthetic oligonucleotide
  Target: ANGPTL4; (+) strand; PAM type: NRG; PAM sequence: CAG
acctcgtgatctgcctgcct

SEQ ID NO: 12009 - DNA, 20 bp, Artificial Sequence
  Description of Artificial Sequence: Synthetic oligonucleotide
  Target: ANGPTL4; (+) strand; PAM type: NRG; PAM sequence: AAG
ctgcctgcctcagcctccca

SEQ ID NO: 12010 - DNA, 20 bp, Artificial Sequence
  Description of Artificial Sequence: Synthetic oligonucleotide
  Target: ANGPTL4; (+) strand; PAM type: NRG; PAM sequence: TGG
gcctcagcctcccaaagtgc

SEQ ID NO: 12011 - DNA, 20 bp, Artificial Sequence
  Description of Artificial Sequence: Synthetic oligonucleotide
  Target: ANGPTL4; (+) strand; PAM type: NRG; PAM sequence: GGG
cctcagcctcccaaagtgct

SEQ ID NO: 12012 - DNA, 20 bp, Artificial Sequence
  Description of Artificial Sequence: Synthetic oligonucleotide
  Target: ANGPTL4; (+) strand; PAM type: NRG; PAM sequence: CAG
ctcccaaagtgctgggatta

SEQ ID NO: 12013 - DNA, 20 bp, Artificial Sequence
  Description of Artificial Sequence: Synthetic oligonucleotide
  Target: ANGPTL4; (+) strand; PAM type: NRG; PAM sequence: AGG
tcccaaagtgctgggattac

SEQ ID NO: 12014 - DNA, 20 bp, Artificial Sequence
  Description of Artificial Sequence: Synthetic oligonucleotide
  Target: ANGPTL4; (+) strand; PAM type: NRG; PAM sequence: GAG
agtgctgggattacaggcgt

SEQ ID NO: 12015 - DNA, 20 bp, Artificial Sequence
  Description of Artificial Sequence: Synthetic oligonucleotide
  Target: ANGPTL4; (+) strand; PAM type: NRG; PAM sequence: CGG
caggcgtgagccaccgcgcc

SEQ ID NO: 12016 - DNA, 20 bp, Artificial Sequence
  Description of Artificial Sequence: Synthetic oligonucleotide
  Target: ANGPTL4; (+) strand; PAM type: NRG; PAM sequence: GAG
ggcctacttatttatttttt

SEQ ID NO: 12017 - DNA, 20 bp, Artificial Sequence
  Description of Artificial Sequence: Synthetic oligonucleotide
  Target: ANGPTL4; (+) strand; PAM type: NRG; PAM sequence: CAG
tacttatttattttttgaga

SEQ ID NO: 12018 - DNA, 20 bp, Artificial Sequence
  Description of Artificial Sequence: Synthetic oligonucleotide
  Target: ANGPTL4; (+) strand; PAM type: NRG; PAM sequence: GAG
cttatttattttttgagaca

SEQ ID NO: 12019 - DNA, 20 bp, Artificial Sequence
  Description of Artificial Sequence: Synthetic oligonucleotide
  Target: ANGPTL4; (+) strand; PAM type: NRG; PAM sequence: CAG
cagagtcccgctgtgtctcc

SEQ ID NO: 12020 - DNA, 20 bp, Artificial Sequence
  Description of Artificial Sequence: Synthetic oligonucleotide
  Target: ANGPTL4; (+) strand; PAM type: NRG; PAM sequence: AGG
agagtcccgctgtgtctccc

SEQ ID NO: 12021 - DNA, 20 bp, Artificial Sequence
  Description of Artificial Sequence: Synthetic oligonucleotide
  Target: ANGPTL4; (+) strand; PAM type: NRG; PAM sequence: TGG
tcccgctgtgtctcccaggc

SEQ ID NO: 12022 - DNA, 20 bp, Artificial Sequence
  Description of Artificial Sequence: Synthetic oligonucleotide
  Target: ANGPTL4; (+) strand; PAM type: NRG; PAM sequence: GAG
ccgctgtgtctcccaggctg

SEQ ID NO: 12023 - DNA, 20 bp, Artificial Sequence
  Description of Artificial Sequence: Synthetic oligonucleotide
  Target: ANGPTL4; (+) strand; PAM type: NRG; PAM sequence: AAG
tgtctcccaggctggagtgc

SEQ ID NO: 12024 - DNA, 20 bp, Artificial Sequence
  Description of Artificial Sequence: Synthetic oligonucleotide
  Target: ANGPTL4; (+) strand; PAM type: NRG; PAM sequence: TGG
gagtgcaagtgacgtgatct

SEQ ID NO: 12025 - DNA, 20 bp, Artificial Sequence
  Description of Artificial Sequence: Synthetic oligonucleotide
  Target: ANGPTL4; (+) strand; PAM type: NRG; PAM sequence: CAG
gacgtgatcttggctcactg

SEQ ID NO: 12026 - DNA, 20 bp, Artificial Sequence
  Description of Artificial Sequence: Synthetic oligonucleotide
  Target: ANGPTL4; (+) strand; PAM type: NRG; PAM sequence: TGG
tcactgcagcctccgcctcc

SEQ ID NO: 12027 - DNA, 20 bp, Artificial Sequence
  Description of Artificial Sequence: Synthetic oligonucleotide
  Target: ANGPTL4; (+) strand; PAM type: NRG; PAM sequence: GGG
cactgcagcctccgcctcct

SEQ ID NO: 12028 - DNA, 20 bp, Artificial Sequence
  Description of Artificial Sequence: Synthetic oligonucleotide
  Target: ANGPTL4; (+) strand; PAM type: NRG; PAM sequence: AAG
agcctccgcctcctgggttc

SEQ ID NO: 12029 - DNA, 20 bp, Artificial Sequence
  Description of Artificial Sequence: Synthetic oligonucleotide
  Target: ANGPTL4; (+) strand; PAM type: NRG; PAM sequence: CAG
ttcaagtgattctcctgcct

SEQ ID NO: 12030 - DNA, 20 bp, Artificial Sequence
  Description of Artificial Sequence: Synthetic oligonucleotide
  Target: ANGPTL4; (+) strand; PAM type: NRG; PAM sequence: GAG
ttctcctgcctcagcctcct

SEQ ID NO: 12031 - DNA, 20 bp, Artificial Sequence
  Description of Artificial Sequence: Synthetic oligonucleotide
  Target: ANGPTL4; (+) strand; PAM type: NRG; PAM sequence: TAG
tcctgcctcagcctcctgag

SEQ ID NO: 12032 - DNA, 20 bp, Artificial Sequence
  Description of Artificial Sequence: Synthetic oligonucleotide
  Target: ANGPTL4; (+) strand; PAM type: NRG; PAM sequence: TGG
gcctcagcctcctgagtagc

SEQ ID NO: 12033 - DNA, 20 bp, Artificial Sequence
  Description of Artificial Sequence: Synthetic oligonucleotide
  Target: ANGPTL4; (+) strand; PAM type: NRG; PAM sequence: GGG
cctcagcctcctgagtagct

SEQ ID NO: 12034 - DNA, 20 bp, Artificial Sequence
  Description of Artificial Sequence: Synthetic oligonucleotide
  Target: ANGPTL4; (+) strand; PAM type: NRG; PAM sequence: CAG
ctcctgagtagctgggatta

SEQ ID NO: 12035 - DNA, 20 bp, Artificial Sequence
  Description of Artificial Sequence: Synthetic oligonucleotide
  Target: ANGPTL4; (+) strand; PAM type: NRG; PAM sequence: AGG
tcctgagtagctgggattac

SEQ ID NO: 12036 - DNA, 20 bp, Artificial Sequence
  Description of Artificial Sequence: Synthetic oligonucleotide
  Target: ANGPTL4; (+) strand; PAM type: NRG; PAM sequence: CAG
caggttcccgccaccatgca

SEQ ID NO: 12037 - DNA, 20 bp, Artificial Sequence
  Description of Artificial Sequence: Synthetic oligonucleotide
  Target: ANGPTL4; (+) strand; PAM type: NRG; PAM sequence: TAG
agataattgttttgtatttt

SEQ ID NO: 12038 - DNA, 20 bp, Artificial Sequence
  Description of Artificial Sequence: Synthetic oligonucleotide
  Target: ANGPTL4; (+) strand; PAM type: NRG; PAM sequence: TAG
taattgttttgtatttttag

SEQ ID NO: 12039 - DNA, 20 bp, Artificial Sequence
  Description of Artificial Sequence: Synthetic oligonucleotide
  Target: ANGPTL4; (+) strand; PAM type: NRG; PAM sequence: GAG
attgttttgtatttttagta

SEQ ID NO: 12040 - DNA, 20 bp, Artificial Sequence
  Description of Artificial Sequence: Synthetic oligonucleotide
  Target: ANGPTL4; (+) strand; PAM type: NRG; PAM sequence: CGG
ttttgtatttttagtagaga

SEQ ID NO: 12041 - DNA, 20 bp, Artificial Sequence
  Description of Artificial Sequence: Synthetic oligonucleotide
  Target: ANGPTL4; (+) strand; PAM type: NRG; PAM sequence: GGG
tttgtatttttagtagagac

SEQ ID NO: 12042 - DNA, 20 bp, Artificial Sequence
  Description of Artificial Sequence: Synthetic oligonucleotide
  Target: ANGPTL4; (+) strand; PAM type: NRG; PAM sequence: GGG
ttgtatttttagtagagacg

SEQ ID NO: 12043 - DNA, 20 bp, Artificial Sequence
  Description of Artificial Sequence: Synthetic oligonucleotide
  Target: ANGPTL4; (+) strand; PAM type: NRG; PAM sequence: TGG
gagacggggtttcaccatgt

SEQ ID NO: 12044 - DNA, 20 bp, Artificial Sequence
  Description of Artificial Sequence: Synthetic oligonucleotide
  Target: ANGPTL4; (+) strand; PAM type: NRG; PAM sequence: CAG
cggggtttcaccatgttggc

SEQ ID NO: 12045 - DNA, 20 bp, Artificial Sequence
  Description of Artificial Sequence: Synthetic oligonucleotide
  Target: ANGPTL4; (+) strand; PAM type: NRG; PAM sequence: AGG
ggggtttcaccatgttggcc

SEQ ID NO: 12046 - DNA, 20 bp, Artificial Sequence
  Description of Artificial Sequence: Synthetic oligonucleotide
  Target: ANGPTL4; (+) strand; PAM type: NRG; PAM sequence: GGG
gggtttcaccatgttggcca

SEQ ID NO: 12047 - DNA, 20 bp, Artificial Sequence
  Description of Artificial Sequence: Synthetic oligonucleotide
  Target: ANGPTL4; (+) strand; PAM type: NRG; PAM sequence: TGG
tttcaccatgttggccaggg

SEQ ID NO: 12048 - DNA, 20 bp, Artificial Sequence
  Description of Artificial Sequence: Synthetic oligonucleotide
  Target: ANGPTL4; (+) strand; PAM type: NRG; PAM sequence: AAG
ggtcttgaactcctgacctc

SEQ ID NO: 12049 - DNA, 20 bp, Artificial Sequence
  Description of Artificial Sequence: Synthetic oligonucleotide
  Target: ANGPTL4; (+) strand; PAM type: NRG; PAM sequence: CGG
ctcaagtgatctgcccacct

SEQ ID NO: 12050 - DNA, 20 bp, Artificial Sequence
  Description of Artificial Sequence: Synthetic oligonucleotide
  Target: ANGPTL4; (+) strand; PAM type: NRG; PAM sequence: AAG
ctgcccacctcggcctccca

SEQ ID NO: 12051 - DNA, 20 bp, Artificial Sequence
  Description of Artificial Sequence: Synthetic oligonucleotide
  Target: ANGPTL4; (+) strand; PAM type: NRG; PAM sequence: TGG
acctcggcctcccaaagtgt

SEQ ID NO: 12052 - DNA, 20 bp, Artificial Sequence
  Description of Artificial Sequence: Synthetic oligonucleotide
  Target: ANGPTL4; (+) strand; PAM type: NRG; PAM sequence: GGG
cctcggcctcccaaagtgtt

SEQ ID NO: 12053 - DNA, 20 bp, Artificial Sequence
  Description of Artificial Sequence: Synthetic oligonucleotide
  Target: ANGPTL4; (+) strand; PAM type: NRG; PAM sequence: CAG
ctcccaaagtgttgggatta

SEQ ID NO: 12054 - DNA, 20 bp, Artificial Sequence
  Description of Artificial Sequence: Synthetic oligonucleotide
  Target: ANGPTL4; (+) strand; PAM type: NRG; PAM sequence: AGG
tcccaaagtgttgggattac

SEQ ID NO: 12055 - DNA, 20 bp, Artificial Sequence
  Description of Artificial Sequence: Synthetic oligonucleotide
  Target: ANGPTL4; (+) strand; PAM type: NRG; PAM sequence: GAG
agtgttgggattacaggcgt

SEQ ID NO: 12056 - DNA, 20 bp, Artificial Sequence
  Description of Artificial Sequence: Synthetic oligonucleotide
  Target: ANGPTL4; (+) strand; PAM type: NRG; PAM sequence: CGG
caggcgtgagccacaatacc

SEQ ID NO: 12057 - DNA, 20 bp, Artificial Sequence
  Description of Artificial Sequence: Synthetic oligonucleotide
  Target: ANGPTL4; (+) strand; PAM type: NRG; PAM sequence: TGG
ggccacaaacatctttataa

SEQ ID NO: 12058 - DNA, 20 bp, Artificial Sequence
  Description of Artificial Sequence: Synthetic oligonucleotide
  Target: ANGPTL4; (+) strand; PAM type: NRG; PAM sequence: CAG
atctttataatggtgctcca

SEQ ID NO: 12059 - DNA, 20 bp, Artificial Sequence
  Description of Artificial Sequence: Synthetic oligonucleotide
  Target: ANGPTL4; (+) strand; PAM type: NRG; PAM sequence: AGG
tctttataatggtgctccac

SEQ ID NO: 12060 - DNA, 20 bp, Artificial Sequence
  Description of Artificial Sequence: Synthetic oligonucleotide
  Target: ANGPTL4; (+) strand; PAM type: NRG; PAM sequence: CAG
ttttttttttttttttgaaa

SEQ ID NO: 12061 - DNA, 20 bp, Artificial Sequence
  Description of Artificial Sequence: Synthetic oligonucleotide
  Target: ANGPTL4; (+) strand; PAM type: NRG; PAM sequence: AGG
tttttttttttttttgaaac

SEQ ID NO: 12062 - DNA, 20 bp, Artificial Sequence
  Description of Artificial Sequence: Synthetic oligonucleotide
  Target: ANGPTL4; (+) strand; PAM type: NRG; PAM sequence: GGG
ttttttttttttttgaaaca

SEQ ID NO: 12063 - DNA, 20 bp, Artificial Sequence
  Description of Artificial Sequence: Synthetic oligonucleotide
  Target: ANGPTL4; (+) strand; PAM type: NRG; PAM sequence: AAG
agggtctcactctgttgcct

SEQ ID NO: 12064 - DNA, 20 bp, Artificial Sequence
  Description of Artificial Sequence: Synthetic oligonucleotide
  Target: ANGPTL4; (+) strand; PAM type: NRG; PAM sequence: TGG
tctcactctgttgcctaagc

SEQ ID NO: 12065 - DNA, 20 bp, Artificial Sequence
  Description of Artificial Sequence: Synthetic oligonucleotide
  Target: ANGPTL4; (+) strand; PAM type: NRG; PAM sequence: GAG
tcactctgttgcctaagctg

SEQ ID NO: 12066 - DNA, 20 bp, Artificial Sequence
  Description of Artificial Sequence: Synthetic oligonucleotide
  Target: ANGPTL4; (+) strand; PAM type: NRG; PAM sequence: CAG
ctgttgcctaagctggagtg

SEQ ID NO: 12067 - DNA, 20 bp, Artificial Sequence
  Description of Artificial Sequence: Synthetic oligonucleotide
  Target: ANGPTL4; (+) strand; PAM type: NRG; PAM sequence: TGG
ttgcctaagctggagtgcag

SEQ ID NO: 12068 - DNA, 20 bp, Artificial Sequence
  Description of Artificial Sequence: Synthetic oligonucleotide
  Target: ANGPTL4; (+) strand; PAM type: NRG; PAM sequence: CGG
ggagtgcagtggtgcgatct

SEQ ID NO: 12069 - DNA, 20 bp, Artificial Sequence
  Description of Artificial Sequence: Synthetic oligonucleotide
  Target: ANGPTL4; (+) strand; PAM type: NRG; PAM sequence: CGG
tcactgcaacctccacctcc

SEQ ID NO: 12070 - DNA, 20 bp, Artificial Sequence
  Description of Artificial Sequence: Synthetic oligonucleotide
  Target: ANGPTL4; (+) strand; PAM type: NRG; PAM sequence: GGG
cactgcaacctccacctccc

SEQ ID NO: 12071 - DNA, 20 bp, Artificial Sequence
  Description of Artificial Sequence: Synthetic oligonucleotide
  Target: ANGPTL4; (+) strand; PAM type: NRG; PAM sequence: AAG
aacctccacctcccgggttc

SEQ ID NO: 12072 - DNA, 20 bp, Artificial Sequence
  Description of Artificial Sequence: Synthetic oligonucleotide
  Target: ANGPTL4; (+) strand; PAM type: NRG; PAM sequence: TAG
tctcaaaaaaaaaaaaaaat

SEQ ID NO: 12073 - DNA, 20 bp, Artificial Sequence
  Description of Artificial Sequence: Synthetic oligonucleotide
  Target: ANGPTL4; (+) strand; PAM type: NRG; PAM sequence: AGG
ctcaaaaaaaaaaaaaaatt

SEQ ID NO: 12074 - DNA, 20 bp, Artificial Sequence
  Description of Artificial Sequence: Synthetic oligonucleotide
  Target: ANGPTL4; (+) strand; PAM type: NRG; PAM sequence: CGG
aaaaaaaaaaaaattaggca

SEQ ID NO: 12075 - DNA, 20 bp, Artificial Sequence
  Description of Artificial Sequence: Synthetic oligonucleotide
  Target: ANGPTL4; (+) strand; PAM type: NRG; PAM sequence: TGG
aaaaaaaaaattaggcacgg

SEQ ID NO: 12076 - DNA, 20 bp, Artificial Sequence
  Description of Artificial Sequence: Synthetic oligonucleotide
  Target: ANGPTL4; (+) strand; PAM type: NRG; PAM sequence: CAG
gtggctcacacttgcaatcc

SEQ ID NO: 12077 - DNA, 20 bp, Artificial Sequence
  Description of Artificial Sequence: Synthetic oligonucleotide
  Target: ANGPTL4; (+) strand; PAM type: NRG; PAM sequence: TGG
cacttgcaatcccagcactt

SEQ ID NO: 12078 - DNA, 20 bp, Artificial Sequence
  Description of Artificial Sequence: Synthetic oligonucleotide
  Target: ANGPTL4; (+) strand; PAM type: NRG; PAM sequence: GGG
acttgcaatcccagcacttt

SEQ ID NO: 12079 - DNA, 20 bp, Artificial Sequence
  Description of Artificial Sequence: Synthetic oligonucleotide
  Target: ANGPTL4; (+) strand; PAM type: NRG; PAM sequence: GAG
ttgcaatcccagcactttgg

SEQ ID NO: 12080 - DNA, 20 bp, Artificial Sequence
  Description of Artificial Sequence: Synthetic oligonucleotide
  Target: ANGPTL4; (+) strand; PAM type: NRG; PAM sequence: AGG
tgcaatcccagcactttggg

SEQ ID NO: 12081 - DNA, 20 bp, Artificial Sequence
  Description of Artificial Sequence: Synthetic oligonucleotide
  Target: ANGPTL4; (+) strand; PAM type: NRG; PAM sequence: AAG
cccagcactttgggaggctg

SEQ ID NO: 12082 - DNA, 20 bp, Artificial Sequence
  Description of Artificial Sequence: Synthetic oligonucleotide
  Target: ANGPTL4; (+) strand; PAM type: NRG; PAM sequence: GAG
gcactttgggaggctgaagc

SEQ ID NO: 12083 - DNA, 20 bp, Artificial Sequence
  Description of Artificial Sequence: Synthetic oligonucleotide
  Target: ANGPTL4; (+) strand; PAM type: NRG; PAM sequence: TGG
ctttgggaggctgaagcgag

SEQ ID NO: 12084 - DNA, 20 bp, Artificial Sequence
  Description of Artificial Sequence: Synthetic oligonucleotide
  Target: ANGPTL4; (+) strand; PAM type: NRG; PAM sequence: GAG
ctgaagcgagtggatcactt

SEQ ID NO: 12085 - DNA, 20 bp, Artificial Sequence
  Description of Artificial Sequence: Synthetic oligonucleotide
  Target: ANGPTL4; (+) strand; PAM type: NRG; PAM sequence: CAG
gcgagtggatcacttgagcc

SEQ ID NO: 12086 - DNA, 20 bp, Artificial Sequence
  Description of Artificial Sequence: Synthetic oligonucleotide
  Target: ANGPTL4; (+) strand; PAM type: NRG; PAM sequence: AGG
cgagtggatcacttgagccc

SEQ ID NO: 12087 - DNA, 20 bp, Artificial Sequence
  Description of Artificial Sequence: Synthetic oligonucleotide
  Target: ANGPTL4; (+) strand; PAM type: NRG; PAM sequence: GAG
agtggatcacttgagcccag

SEQ ID NO: 12088 - DNA, 20 bp, Artificial Sequence
  Description of Artificial Sequence: Synthetic oligonucleotide
  Target: ANGPTL4; (+) strand; PAM type: NRG; PAM sequence: GAG
tgagcccaggagaccaatct

SEQ ID NO: 12089 - DNA, 20 bp, Artificial Sequence
  Description of Artificial Sequence: Synthetic oligonucleotide
  Target: ANGPTL4; (+) strand; PAM type: NRG; PAM sequence: CAG
caggagaccaatctgagcaa

SEQ ID NO: 12090 - DNA, 20 bp, Artificial Sequence
  Description of Artificial Sequence: Synthetic oligonucleotide
  Target: ANGPTL4; (+) strand; PAM type: NRG; PAM sequence: AGG
aggagaccaatctgagcaac

SEQ ID NO: 12091 - DNA, 20 bp, Artificial Sequence
  Description of Artificial Sequence: Synthetic oligonucleotide
  Target: ANGPTL4; (+) strand; PAM type: NRG; PAM sequence: GGG
ggagaccaatctgagcaaca

SEQ ID NO: 12092 - DNA, 20 bp, Artificial Sequence
  Description of Artificial Sequence: Synthetic oligonucleotide
  Target: ANGPTL4; (+) strand; PAM type: NRG; PAM sequence: TAG
caattaaaaatacaaaaaac

SEQ ID NO: 12093 - DNA, 20 bp, Artificial Sequence
  Description of Artificial Sequence: Synthetic oligonucleotide
  Target: ANGPTL4; (+) strand; PAM type: NRG; PAM sequence: TGG
taaaaatacaaaaaactagc

SEQ ID NO: 12094 - DNA, 20 bp, Artificial Sequence
  Description of Artificial Sequence: Synthetic oligonucleotide
  Target: ANGPTL4; (+) strand; PAM type: NRG; PAM sequence: GGG
aaaaatacaaaaaactagct

SEQ ID NO: 12095 - DNA, 20 bp, Artificial Sequence
  Description of Artificial Sequence: Synthetic oligonucleotide
  Target: ANGPTL4; (+) strand; PAM type: NRG; PAM sequence: TGG
tacaaaaaactagctgggca

SEQ ID NO: 12096 - DNA, 20 bp, Artificial Sequence
  Description of Artificial Sequence: Synthetic oligonucleotide
  Target: ANGPTL4; (+) strand; PAM type: NRG; PAM sequence: TGG
aaaaaactagctgggcatgg

SEQ ID NO: 12097 - DNA, 20 bp, Artificial Sequence
  Description of Artificial Sequence: Synthetic oligonucleotide
  Target: ANGPTL4; (+) strand; PAM type: NRG; PAM sequence: TGG
tgcctgtgttcccatctact

SEQ ID NO: 12098 - DNA, 20 bp, Artificial Sequence
  Description of Artificial Sequence: Synthetic oligonucleotide
  Target: ANGPTL4; (+) strand; PAM type: NRG; PAM sequence: GGG
gcctgtgttcccatctactt

SEQ ID NO: 12099 - DNA, 20 bp, Artificial Sequence
  Description of Artificial Sequence: Synthetic oligonucleotide
  Target: ANGPTL4; (+) strand; PAM type: NRG; PAM sequence: GAG
ctgtgttcccatctacttgg

SEQ ID NO: 12100 - DNA, 20 bp, Artificial Sequence
  Description of Artificial Sequence: Synthetic oligonucleotide
  Target: ANGPTL4; (+) strand; PAM type: NRG; PAM sequence: AGG
tgtgttcccatctacttggg

SEQ ID NO: 12101 - DNA, 20 bp, Artificial Sequence
  Description of Artificial Sequence: Synthetic oligonucleotide
  Target: ANGPTL4; (+) strand; PAM type: NRG; PAM sequence: GAG
tcccatctacttgggaggct

SEQ ID NO: 12102 - DNA, 20 bp, Artificial Sequence
  Description of Artificial Sequence: Synthetic oligonucleotide
  Target: ANGPTL4; (+) strand; PAM type: NRG; PAM sequence: TGG
atctacttgggaggctgagt

SEQ ID NO: 12103 - DNA, 20 bp, Artificial Sequence
  Description of Artificial Sequence: Synthetic oligonucleotide
  Target: ANGPTL4; (+) strand; PAM type: NRG; PAM sequence: GGG
tctacttgggaggctgagtt

SEQ ID NO: 12104 - DNA, 20 bp, Artificial Sequence
  Description of Artificial Sequence: Synthetic oligonucleotide
  Target: ANGPTL4; (+) strand; PAM type: NRG; PAM sequence: GAG
tacttgggaggctgagttgg

SEQ ID NO: 12105 - DNA, 20 bp, Artificial Sequence
  Description of Artificial Sequence: Synthetic oligonucleotide
  Target: ANGPTL4; (+) strand; PAM type: NRG; PAM sequence: AGG
acttgggaggctgagttggg

SEQ ID NO: 12106 - DNA, 20 bp, Artificial Sequence
  Description of Artificial Sequence: Synthetic oligonucleotide
  Target: ANGPTL4; (+) strand; PAM type: NRG; PAM sequence: GAG
ctgagttgggaggatctctt

SEQ ID NO: 12107 - DNA, 20 bp, Artificial Sequence
  Description of Artificial Sequence: Synthetic oligonucleotide
  Target: ANGPTL4; (+) strand; PAM type: NRG; PAM sequence: TAG
ttgggaggatctcttgagcc

SEQ ID NO: 12108 - DNA, 20 bp, Artificial Sequence
  Description of Artificial Sequence: Synthetic oligonucleotide
  Target: ANGPTL4; (+) strand; PAM type: NRG; PAM sequence: AGG
tgggaggatctcttgagcct

SEQ ID NO: 12109 - DNA, 20 bp, Artificial Sequence
  Description of Artificial Sequence: Synthetic oligonucleotide
  Target: ANGPTL4; (+) strand; PAM type: NRG; PAM sequence: GAG
ggaggatctcttgagcctag

SEQ ID NO: 12110 - DNA, 20 bp, Artificial Sequence
  Description of Artificial Sequence: Synthetic oligonucleotide
  Target: ANGPTL4; (+) strand; PAM type: NRG; PAM sequence: AAG
atctcttgagcctaggagat

SEQ ID NO: 12111 - DNA, 20 bp, Artificial Sequence
  Description of Artificial Sequence: Synthetic oligonucleotide
  Target: ANGPTL4; (+) strand; PAM type: NRG; PAM sequence: AGG
tctcttgagcctaggagata

SEQ ID NO: 12112 - DNA, 20 bp, Artificial Sequence
  Description of Artificial Sequence: Synthetic oligonucleotide
  Target: ANGPTL4; (+) strand; PAM type: NRG; PAM sequence: CAG
gagcctaggagataaggctg

SEQ ID NO: 12113 - DNA, 20 bp, Artificial Sequence
  Description of Artificial Sequence: Synthetic oligonucleotide
  Target: ANGPTL4; (+) strand; PAM type: NRG; PAM sequence: GAG
ctaggagataaggctgcagt

SEQ ID NO: 12114 - DNA, 20 bp, Artificial Sequence
  Description of Artificial Sequence: Synthetic oligonucleotide
  Target: ANGPTL4; (+) strand; PAM type: NRG; PAM sequence: GAG
agataaggctgcagtgagct

SEQ ID NO: 12115 - DNA, 20 bp, Artificial Sequence
  Description of Artificial Sequence: Synthetic oligonucleotide
  Target: ANGPTL4; (+) strand; PAM type: NRG; PAM sequence: AAG
gagactgcgccactgcactc

SEQ ID NO: 12116 - DNA, 20 bp, Artificial Sequence
  Description of Artificial Sequence: Synthetic oligonucleotide
  Target: ANGPTL4; (+) strand; PAM type: NRG; PAM sequence: TGG
tgcgccactgcactcaagcc

SEQ ID NO: 12117 - DNA, 20 bp, Artificial Sequence
  Description of Artificial Sequence: Synthetic oligonucleotide
  Target: ANGPTL4; (+) strand; PAM type: NRG; PAM sequence: GGG
gcgccactgcactcaagcct

SEQ ID NO: 12118 - DNA, 20 bp, Artificial Sequence
  Description of Artificial Sequence: Synthetic oligonucleotide
  Target: ANGPTL4; (+) strand; PAM type: NRG; PAM sequence: CAG
ctgcactcaagcctgggtga

SEQ ID NO: 12119 - DNA, 20 bp, Artificial Sequence
  Description of Artificial Sequence: Synthetic oligonucleotide
  Target: ANGPTL4; (+) strand; PAM type: NRG; PAM sequence: GAG
gcactcaagcctgggtgaca

SEQ ID NO: 12120 - DNA, 20 bp, Artificial Sequence
  Description of Artificial Sequence: Synthetic oligonucleotide
  Target: ANGPTL4; (+) strand; PAM type: NRG; PAM sequence: GAG
tcaagcctgggtgacagagt

SEQ ID NO: 12121 - DNA, 20 bp, Artificial Sequence
  Description of Artificial Sequence: Synthetic oligonucleotide
  Target: ANGPTL4; (+) strand; PAM type: NRG; PAM sequence: AAG
gagtgagacccctgcctcaa

SEQ ID NO: 12122 - DNA, 20 bp, Artificial Sequence
  Description of Artificial Sequence: Synthetic oligonucleotide
  Target: ANGPTL4; (+) strand; PAM type: NRG; PAM sequence: AAG
gacccctgcctcaaaagaaa

SEQ ID NO: 12123 - DNA, 20 bp, Artificial Sequence
  Description of Artificial Sequence: Synthetic oligonucleotide
  Target: ANGPTL4; (+) strand; PAM type: NRG; PAM sequence: CAG
caaaagaaaaagaaaaaatg

SEQ ID NO: 12124 - DNA, 20 bp, Artificial Sequence
  Description of Artificial Sequence: Synthetic oligonucleotide
  Target: ANGPTL4; (+) strand; PAM type: NRG; PAM sequence: AGG
aaaagaaaaagaaaaaatgc

SEQ ID NO: 12125 - DNA, 20 bp, Artificial Sequence
  Description of Artificial Sequence: Synthetic oligonucleotide
  Target: ANGPTL4; (+) strand; PAM type: NRG; PAM sequence: TGG
aaaaagaaaaaatgcaggca

SEQ ID NO: 12126 - DNA, 20 bp, Artificial Sequence
  Description of Artificial Sequence: Synthetic oligonucleotide
  Target: ANGPTL4; (+) strand; PAM type: NRG; PAM sequence: TGG
aagaaaaaatgcaggcatgg

SEQ ID NO: 12127 - DNA, 20 bp, Artificial Sequence
  Description of Artificial Sequence: Synthetic oligonucleotide
  Target: ANGPTL4; (+) strand; PAM type: NRG; PAM sequence: TGG
ggcatggtggctcacacctg

SEQ ID NO: 12128 - DNA, 20 bp, Artificial Sequence
  Description of Artificial Sequence: Synthetic oligonucleotide
  Target: ANGPTL4; (+) strand; PAM type: NRG; PAM sequence: CAG
gtggctcacacctgtggtcc

SEQ ID NO: 12129 - DNA, 20 bp, Artificial Sequence
  Description of Artificial Sequence: Synthetic oligonucleotide
  Target: ANGPTL4; (+) strand; PAM type: NRG; PAM sequence: TGG
cacctgtggtcccagctact

SEQ ID NO: 12130 - DNA, 20 bp, Artificial Sequence
  Description of Artificial Sequence: Synthetic oligonucleotide
  Target: ANGPTL4; (+) strand; PAM type: NRG; PAM sequence: GGG
acctgtggtcccagctactt

SEQ ID NO: 12131 - DNA, 20 bp, Artificial Sequence
  Description of Artificial Sequence: Synthetic oligonucleotide
  Target: ANGPTL4; (+) strand; PAM type: NRG; PAM sequence: GAG
ctgtggtcccagctacttgg

SEQ ID NO: 12132 - DNA, 20 bp, Artificial Sequence
  Description of Artificial Sequence: Synthetic oligonucleotide
  Target: ANGPTL4; (+) strand; PAM type: NRG; PAM sequence: AGG
tgtggtcccagctacttggg

SEQ ID NO: 12133 - DNA, 20 bp, Artificial Sequence
  Description of Artificial Sequence: Synthetic oligonucleotide
  Target: ANGPTL4; (+) strand; PAM type: NRG; PAM sequence: CAG
tcccagctacttgggaggcc

SEQ ID NO: 12134 - DNA, 20 bp, Artificial Sequence
  Description of Artificial Sequence: Synthetic oligonucleotide
  Target: ANGPTL4; (+) strand; PAM type: NRG; PAM sequence: AGG
cccagctacttgggaggccc

SEQ ID NO: 12135 - DNA, 20 bp, Artificial Sequence
  Description of Artificial Sequence: Synthetic oligonucleotide
  Target: ANGPTL4; (+) strand; PAM type: NRG; PAM sequence: AAG
tacttgggaggcccaggtac

SEQ ID NO: 12136 - DNA, 20 bp, Artificial Sequence
  Description of Artificial Sequence: Synthetic oligonucleotide
  Target: ANGPTL4; (+) strand; PAM type: NRG; PAM sequence: GAG
cccaggtacaagaatcactt

SEQ ID NO: 12137 - DNA, 20 bp, Artificial Sequence
  Description of Artificial Sequence: Synthetic oligonucleotide
  Target: ANGPTL4; (+) strand; PAM type: NRG; PAM sequence: AAG
caagaatcacttgagcccgt

SEQ ID NO: 12138 - DNA, 20 bp, Artificial Sequence
  Description of Artificial Sequence: Synthetic oligonucleotide
  Target: ANGPTL4; (+) strand; PAM type: NRG; PAM sequence: AGG
aagaatcacttgagcccgta

SEQ ID NO: 12139 - DNA, 20 bp, Artificial Sequence
  Description of Artificial Sequence: Synthetic oligonucleotide
  Target: ANGPTL4; (+) strand; PAM type: NRG; PAM sequence: GAG
cgtaaggttgacgctgcatt

SEQ ID NO: 12140 - DNA, 20 bp, Artificial Sequence
  Description of Artificial Sequence: Synthetic oligonucleotide
  Target: ANGPTL4; (+) strand; PAM type: NRG; PAM sequence: CAG
atcaccacaccactgcactc

SEQ ID NO: 12141 - DNA, 20 bp, Artificial Sequence
  Description of Artificial Sequence: Synthetic oligonucleotide
  Target: ANGPTL4; (+) strand; PAM type: NRG; PAM sequence: TGG
cacaccactgcactccagcc

SEQ ID NO: 12142 - DNA, 20 bp, Artificial Sequence
  Description of Artificial Sequence: Synthetic oligonucleotide
  Target: ANGPTL4; (+) strand; PAM type: NRG; PAM sequence: GGG
acaccactgcactccagcct

SEQ ID NO: 12143 - DNA, 20 bp, Artificial Sequence
  Description of Artificial Sequence: Synthetic oligonucleotide
  Target: ANGPTL4; (+) strand; PAM type: NRG; PAM sequence: TGG
ctgcactccagcctgggcaa

SEQ ID NO: 12144 - DNA, 20 bp, Artificial Sequence
  Description of Artificial Sequence: Synthetic oligonucleotide
  Target: ANGPTL4; (+) strand; PAM type: NRG; PAM sequence: GAG
gcactccagcctgggcaatg

SEQ ID NO: 12145 - DNA, 20 bp, Artificial Sequence
  Description of Artificial Sequence: Synthetic oligonucleotide
  Target: ANGPTL4; (+) strand; PAM type: NRG; PAM sequence: CAG
tccagcctgggcaatggagc

SEQ ID NO: 12146 - DNA, 20 bp, Artificial Sequence
  Description of Artificial Sequence: Synthetic oligonucleotide
  Target: ANGPTL4; (+) strand; PAM type: NRG; PAM sequence: AGG
ccagcctgggcaatggagcc

SEQ ID NO: 12147 - DNA, 20 bp, Artificial Sequence
  Description of Artificial Sequence: Synthetic oligonucleotide
  Target: ANGPTL4; (+) strand; PAM type: NRG; PAM sequence: AAG
ttgtttttaaacttaaaaat

SEQ ID NO: 12148 - DNA, 20 bp, Artificial Sequence
  Description of Artificial Sequence: Synthetic oligonucleotide
  Target: ANGPTL4; (+) strand; PAM type: NRG; PAM sequence: AGG
tgtttttaaacttaaaaata

SEQ ID NO: 12149 - DNA, 20 bp, Artificial Sequence
  Description of Artificial Sequence: Synthetic oligonucleotide
  Target: ANGPTL4; (+) strand; PAM type: NRG; PAM sequence: CGG
tttaaacttaaaaataaggc

SEQ ID NO: 12150 - DNA, 20 bp, Artificial Sequence
  Description of Artificial Sequence: Synthetic oligonucleotide
  Target: ANGPTL4; (+) strand; PAM type: NRG; PAM sequence: GGG
ttaaacttaaaaataaggcc

SEQ ID NO: 12151 - DNA, 20 bp, Artificial Sequence
  Description of Artificial Sequence: Synthetic oligonucleotide
  Target: ANGPTL4; (+) strand; PAM type: NRG; PAM sequence: TGG
cttaaaaataaggccgggtg

SEQ ID NO: 12152 - DNA, 20 bp, Artificial Sequence
  Description of Artificial Sequence: Synthetic oligonucleotide
  Target: ANGPTL4; (+) strand; PAM type: NRG; PAM sequence: GGG
ttaaaaataaggccgggtgt

SEQ ID NO: 12153 - DNA, 20 bp, Artificial Sequence
  Description of Artificial Sequence: Synthetic oligonucleotide
  Target: ANGPTL4; (+) strand; PAM type: NRG; PAM sequence: GGG
taaaaataaggccgggtgtg

SEQ ID NO: 12154 - DNA, 20 bp, Artificial Sequence
  Description of Artificial Sequence: Synthetic oligonucleotide
  Target: ANGPTL4; (+) strand; PAM type: NRG; PAM sequence: GGG
aaaaataaggccgggtgtgg

SEQ ID NO: 12155 - DNA, 20 bp, Artificial Sequence
  Description of Artificial Sequence: Synthetic oligonucleotide
  Target: ANGPTL4; (+) strand; PAM type: NRG; PAM sequence: CAG
ggggctcacacctgtaatcc

SEQ ID NO: 12156 - DNA, 20 bp, Artificial Sequence
  Description of Artificial Sequence: Synthetic oligonucleotide
  Target: ANGPTL4; (+) strand; PAM type: NRG; PAM sequence: TGG
cacctgtaatcccagcactt

SEQ ID NO: 12157 - DNA, 20 bp, Artificial Sequence
  Description of Artificial Sequence: Synthetic oligonucleotide
  Target: ANGPTL4; (+) strand; PAM type: NRG; PAM sequence: GGG
acctgtaatcccagcacttt

SEQ ID NO: 12158 - DNA, 20 bp, Artificial Sequence
  Description of Artificial Sequence: Synthetic oligonucleotide
  Target: ANGPTL4; (+) strand; PAM type: NRG; PAM sequence: GAG
ctgtaatcccagcactttgg

SEQ ID NO: 12159 - DNA, 20 bp, Artificial Sequence
  Description of Artificial Sequence: Synthetic oligonucleotide
  Target: ANGPTL4; (+) strand; PAM type: NRG; PAM sequence: AGG
tgtaatcccagcactttggg

SEQ ID NO: 12160 - DNA, 20 bp, Artificial Sequence
  Description of Artificial Sequence: Synthetic oligonucleotide
  Target: ANGPTL4; (+) strand; PAM type: NRG; PAM sequence: GAG
tcccagcactttgggaggcc

SEQ ID NO: 12161 - DNA, 20 bp, Artificial Sequence
  Description of Artificial Sequence: Synthetic oligonucleotide
  Target: ANGPTL4; (+) strand; PAM type: NRG; PAM sequence: AGG
cccagcactttgggaggccg

SEQ ID NO: 12162 - DNA, 20 bp, Artificial Sequence
  Description of Artificial Sequence: Synthetic oligonucleotide
  Target: ANGPTL4; (+) strand; PAM type: NRG; PAM sequence: TGG
agcactttgggaggccgagg

SEQ ID NO: 12163 - DNA, 20 bp, Artificial Sequence
  Description of Artificial Sequence: Synthetic oligonucleotide
  Target: ANGPTL4; (+) strand; PAM type: NRG; PAM sequence: GGG
gcactttgggaggccgaggt

SEQ ID NO: 12164 - DNA, 20 bp, Artificial Sequence
  Description of Artificial Sequence: Synthetic oligonucleotide
  Target: ANGPTL4; (+) strand; PAM type: NRG; PAM sequence: TGG
ctttgggaggccgaggtggg

SEQ ID NO: 12165 - DNA, 20 bp, Artificial Sequence
  Description of Artificial Sequence: Synthetic oligonucleotide
  Target: ANGPTL4; (+) strand; PAM type: NRG; PAM sequence: GAG
ccgaggtgggtggatcacct

SEQ ID NO: 12166 - DNA, 20 bp, Artificial Sequence
  Description of Artificial Sequence: Synthetic oligonucleotide
  Target: ANGPTL4; (+) strand; PAM type: NRG; PAM sequence: AGG
cgaggtgggtggatcacctg

SEQ ID NO: 12167 - DNA, 20 bp, Artificial Sequence
  Description of Artificial Sequence: Synthetic oligonucleotide
  Target: ANGPTL4; (+) strand; PAM type: NRG; PAM sequence: CAG
gtgggtggatcacctgaggt

SEQ ID NO: 12168 - DNA, 20 bp, Artificial Sequence
  Description of Artificial Sequence: Synthetic oligonucleotide
  Target: ANGPTL4; (+) strand; PAM type: NRG; PAM sequence: AGG
tgggtggatcacctgaggtc

SEQ ID NO: 12169 - DNA, 20 bp, Artificial Sequence
  Description of Artificial Sequence: Synthetic oligonucleotide
  Target: ANGPTL4; (+) strand; PAM type: NRG; PAM sequence: GAG
ggtggatcacctgaggtcag

SEQ ID NO: 12170 - DNA, 20 bp, Artificial Sequence
  Description of Artificial Sequence: Synthetic oligonucleotide
  Target: ANGPTL4; (+) strand; PAM type: NRG; PAM sequence: TAG
tgaggtcaggagttcaaaac

SEQ ID NO: 12171 - DNA, 20 bp, Artificial Sequence
  Description of Artificial Sequence: Synthetic oligonucleotide
  Target: ANGPTL4; (+) strand; PAM type: NRG; PAM sequence: TGG
tcaggagttcaaaactagcc

SEQ ID NO: 12172 - DNA, 20 bp, Artificial Sequence
  Description of Artificial Sequence: Synthetic oligonucleotide
  Target: ANGPTL4; (+) strand; PAM type: NRG; PAM sequence: TGG
caaaactagcctggccaaca

SEQ ID NO: 12173 - DNA, 20 bp, Artificial Sequence
  Description of Artificial Sequence: Synthetic oligonucleotide
  Target: ANGPTL4; (+) strand; PAM type: NRG; PAM sequence: TAG
tctactaaaaatacaaaaat

SEQ ID NO: 12174 - DNA, 20 bp, Artificial Sequence
  Description of Artificial Sequence: Synthetic oligonucleotide
  Target: ANGPTL4; (+) strand; PAM type: NRG; PAM sequence: AGG
ctactaaaaatacaaaaatt

SEQ ID NO: 12175 - DNA, 20 bp, Artificial Sequence
  Description of Artificial Sequence: Synthetic oligonucleotide
  Target: ANGPTL4; (+) strand; PAM type: NRG; PAM sequence: CAG
taaaaatacaaaaattaggc

SEQ ID NO: 12176 - DNA, 20 bp, Artificial Sequence
  Description of Artificial Sequence: Synthetic oligonucleotide
  Target: ANGPTL4; (+) strand; PAM type: NRG; PAM sequence: AGG
aaaaatacaaaaattaggcc

SEQ ID NO: 12177 - DNA, 20 bp, Artificial Sequence
  Description of Artificial Sequence: Synthetic oligonucleotide
  Target: ANGPTL4; (+) strand; PAM type: NRG; PAM sequence: CAG
tacaaaaattaggccaggcg

SEQ ID NO: 12178 - DNA, 20 bp, Artificial Sequence
  Description of Artificial Sequence: Synthetic oligonucleotide
  Target: ANGPTL4; (+) strand; PAM type: NRG; PAM sequence: TGG
aaaaattaggccaggcgcag

SEQ ID NO: 12179 - DNA, 20 bp, Artificial Sequence
  Description of Artificial Sequence: Synthetic oligonucleotide
  Target: ANGPTL4; (+) strand; PAM type: NRG; PAM sequence: GGG
aaaattaggccaggcgcagt

SEQ ID NO: 12180 - DNA, 20 bp, Artificial Sequence
  Description of Artificial Sequence: Synthetic oligonucleotide
  Target: ANGPTL4; (+) strand; PAM type: NRG; PAM sequence: CAG
gtgggtcatacctgtaatcc

SEQ ID NO: 12181 - DNA, 20 bp, Artificial Sequence
  Description of Artificial Sequence: Synthetic oligonucleotide
  Target: ANGPTL4; (+) strand; PAM type: NRG; PAM sequence: TGG
tacctgtaatcccagcactt

SEQ ID NO: 12182 - DNA, 20 bp, Artificial Sequence
  Description of Artificial Sequence: Synthetic oligonucleotide
  Target: ANGPTL4; (+) strand; PAM type: NRG; PAM sequence: GGG
acctgtaatcccagcacttt

SEQ ID NO: 12183 - DNA, 20 bp, Artificial Sequence
  Description of Artificial Sequence: Synthetic oligonucleotide
  Target: ANGPTL4; (+) strand; PAM type: NRG; PAM sequence: GAG
ctgtaatcccagcactttgg

SEQ ID NO: 12184 - DNA, 20 bp, Artificial Sequence
  Description of Artificial Sequence: Synthetic oligonucleotide
  Target: ANGPTL4; (+) strand; PAM type: NRG; PAM sequence: AGG
tgtaatcccagcactttggg

SEQ ID NO: 12185 - DNA, 20 bp, Artificial Sequence
  Description of Artificial Sequence: Synthetic oligonucleotide
  Target: ANGPTL4; (+) strand; PAM type: NRG; PAM sequence: GAG
tcccagcactttgggaggct

SEQ ID NO: 12186 - DNA, 20 bp, Artificial Sequence
  Description of Artificial Sequence: Synthetic oligonucleotide
  Target: ANGPTL4; (+) strand; PAM type: NRG; PAM sequence: AGG
cccagcactttgggaggctg

SEQ ID NO: 12187 - DNA, 20 bp, Artificial Sequence
  Description of Artificial Sequence: Synthetic oligonucleotide
  Target: ANGPTL4; (+) strand; PAM type: NRG; PAM sequence: GAG
cagcactttgggaggctgag

SEQ ID NO: 12188 - DNA, 20 bp, Artificial Sequence
  Description of Artificial Sequence: Synthetic oligonucleotide
  Target: ANGPTL4; (+) strand; PAM type: NRG; PAM sequence: AGG
agcactttgggaggctgagg

SEQ ID NO: 12189 - DNA, 20 bp, Artificial Sequence
  Description of Artificial Sequence: Synthetic oligonucleotide
  Target: ANGPTL4; (+) strand; PAM type: NRG; PAM sequence: GGG
gcactttgggaggctgagga

SEQ ID NO: 12190 - DNA, 20 bp, Artificial Sequence
  Description of Artificial Sequence: Synthetic oligonucleotide
  Target: ANGPTL4; (+) strand; PAM type: NRG; PAM sequence: TGG
ctttgggaggctgaggaggg

SEQ ID NO: 12191 - DNA, 20 bp, Artificial Sequence
  Description of Artificial Sequence: Synthetic oligonucleotide
  Target: ANGPTL4; (+) strand; PAM type: NRG; PAM sequence: GAG
ctgaggagggtggatcacat

SEQ ID NO: 12192 - DNA, 20 bp, Artificial Sequence
  Description of Artificial Sequence: Synthetic oligonucleotide
  Target: ANGPTL4; (+) strand; PAM type: NRG; PAM sequence: AGG
tgaggagggtggatcacatg

SEQ ID NO: 12193 - DNA, 20 bp, Artificial Sequence
  Description of Artificial Sequence: Synthetic oligonucleotide
  Target: ANGPTL4; (+) strand; PAM type: NRG; PAM sequence: AAG
gagggtggatcacatgaggt

SEQ ID NO: 12194 - DNA, 20 bp, Artificial Sequence
  Description of Artificial Sequence: Synthetic oligonucleotide
  Target: ANGPTL4; (+) strand; PAM type: NRG; PAM sequence: AGG
agggtggatcacatgaggta

SEQ ID NO: 12195 - DNA, 20 bp, Artificial Sequence
  Description of Artificial Sequence: Synthetic oligonucleotide
  Target: ANGPTL4; (+) strand; PAM type: NRG; PAM sequence: GAG
ggtggatcacatgaggtaag

SEQ ID NO: 12196 - DNA, 20 bp, Artificial Sequence
  Description of Artificial Sequence: Synthetic oligonucleotide
  Target: ANGPTL4; (+) strand; PAM type: NRG; PAM sequence: GAG
tcacatgaggtaaggagttt

SEQ ID NO: 12197 - DNA, 20 bp, Artificial Sequence
  Description of Artificial Sequence: Synthetic oligonucleotide
  Target: ANGPTL4; (+) strand; PAM type: NRG; PAM sequence: TGG
taaggagtttgagaccaacc

SEQ ID NO: 12198 - DNA, 20 bp, Artificial Sequence
  Description of Artificial Sequence: Synthetic oligonucleotide
  Target: ANGPTL4; (+) strand; PAM type: NRG; PAM sequence: TGG
tgagaccaacctggccaaca

SEQ ID NO: 12199 - DNA, 20 bp, Artificial Sequence
  Description of Artificial Sequence: Synthetic oligonucleotide
  Target: ANGPTL4; (+) strand; PAM type: NRG; PAM sequence: TAG
actactaaaaatacaaaaac

SEQ ID NO: 12200 - DNA, 20 bp, Artificial Sequence
  Description of Artificial Sequence: Synthetic oligonucleotide
  Target: ANGPTL4; (+) strand; PAM type: NRG; PAM sequence: CAG
ctaaaaatacaaaaactagc

SEQ ID NO: 12201 - DNA, 20 bp, Artificial Sequence
  Description of Artificial Sequence: Synthetic oligonucleotide
  Target: ANGPTL4; (+) strand; PAM type: NRG; PAM sequence: AGG
taaaaatacaaaaactagcc

SEQ ID NO: 12202 - DNA, 20 bp, Artificial Sequence
  Description of Artificial Sequence: Synthetic oligonucleotide
  Target: ANGPTL4; (+) strand; PAM type: NRG; PAM sequence: TGG
atacaaaaactagccaggcg

SEQ ID NO: 12203 - DNA, 20 bp, Artificial Sequence
  Description of Artificial Sequence: Synthetic oligonucleotide
  Target: ANGPTL4; (+) strand; PAM type: NRG; PAM sequence: TGG
caaaaactagccaggcgtgg

SEQ ID NO: 12204 - DNA, 20 bp, Artificial Sequence
  Description of Artificial Sequence: Synthetic oligonucleotide
  Target: ANGPTL4; (+) strand; PAM type: NRG; PAM sequence: CGG
aaactagccaggcgtggtgg

SEQ ID NO: 12205 - DNA, 20 bp, Artificial Sequence
  Description of Artificial Sequence: Synthetic oligonucleotide
  Target: ANGPTL4; (+) strand; PAM type: NRG; PAM sequence: GGG
aactagccaggcgtggtggc

SEQ ID NO: 12206 - DNA, 20 bp, Artificial Sequence
  Description of Artificial Sequence: Synthetic oligonucleotide
  Target: ANGPTL4; (+) strand; PAM type: NRG; PAM sequence: CGG
gtggcgggtgcctgtaatcc

SEQ ID NO: 12207 - DNA, 20 bp, Artificial Sequence
  Description of Artificial Sequence: Synthetic oligonucleotide
  Target: ANGPTL4; (+) strand; PAM type: NRG; PAM sequence: CAG
tgcctgtaatcccggctact

SEQ ID NO: 12208 - DNA, 20 bp, Artificial Sequence
  Description of Artificial Sequence: Synthetic oligonucleotide
  Target: ANGPTL4; (+) strand; PAM type: NRG; PAM sequence: AGG
gcctgtaatcccggctactc

SEQ ID NO: 12209 - DNA, 20 bp, Artificial Sequence
  Description of Artificial Sequence: Synthetic oligonucleotide
  Target: ANGPTL4; (+) strand; PAM type: NRG; PAM sequence: GAG
ctgtaatcccggctactcag

SEQ ID NO: 12210 - DNA, 20 bp, Artificial Sequence
  Description of Artificial Sequence: Synthetic oligonucleotide
  Target: ANGPTL4; (+) strand; PAM type: NRG; PAM sequence: AGG
tgtaatcccggctactcagg

SEQ ID NO: 12211 - DNA, 20 bp, Artificial Sequence
  Description of Artificial Sequence: Synthetic oligonucleotide
  Target: ANGPTL4; (+) strand; PAM type: NRG; PAM sequence: GAG
tcccggctactcaggaggct

SEQ ID NO: 12212 - DNA, 20 bp, Artificial Sequence
  Description of Artificial Sequence: Synthetic oligonucleotide
  Target: ANGPTL4; (+) strand; PAM type: NRG; PAM sequence: AGG
cccggctactcaggaggctg

SEQ ID NO: 12213 - DNA, 20 bp, Artificial Sequence
  Description of Artificial Sequence: Synthetic oligonucleotide
  Target: ANGPTL4; (+) strand; PAM type: NRG; PAM sequence: GAG
tactcaggaggctgaggcat

SEQ ID NO: 12214 - DNA, 20 bp, Artificial Sequence
  Description of Artificial Sequence: Synthetic oligonucleotide
  Target: ANGPTL4; (+) strand; PAM type: NRG; PAM sequence: TGG
gcatgagaatcccttgaacc

SEQ ID NO: 12215 - DNA, 20 bp, Artificial Sequence
  Description of Artificial Sequence: Synthetic oligonucleotide
  Target: ANGPTL4; (+) strand; PAM type: NRG; PAM sequence: GGG
catgagaatcccttgaacct

SEQ ID NO: 12216 - DNA, 20 bp, Artificial Sequence
  Description of Artificial Sequence: Synthetic oligonucleotide
  Target: ANGPTL4; (+) strand; PAM type: NRG; PAM sequence: GAG
tgagaatcccttgaacctgg

SEQ ID NO: 12217 - DNA, 20 bp, Artificial Sequence
  Description of Artificial Sequence: Synthetic oligonucleotide
  Target: ANGPTL4; (+) strand; PAM type: NRG; PAM sequence: AGG
gagaatcccttgaacctggg

SEQ ID NO: 12218 - DNA, 20 bp, Artificial Sequence
  Description of Artificial Sequence: Synthetic oligonucleotide
  Target: ANGPTL4; (+) strand; PAM type: NRG; PAM sequence: CAG
aatcccttgaacctgggagg

SEQ ID NO: 12219 - DNA, 20 bp, Artificial Sequence
  Description of Artificial Sequence: Synthetic oligonucleotide
  Target: ANGPTL4; (+) strand; PAM type: NRG; PAM sequence: GAG
tcccttgaacctgggaggca

SEQ ID NO: 12220 - DNA, 20 bp, Artificial Sequence
  Description of Artificial Sequence: Synthetic oligonucleotide
  Target: ANGPTL4; (+) strand; PAM type: NRG; PAM sequence: AGG
cccttgaacctgggaggcag

SEQ ID NO: 12221 - DNA, 20 bp, Artificial Sequence
  Description of Artificial Sequence: Synthetic oligonucleotide
  Target: ANGPTL4; (+) strand; PAM type: NRG; PAM sequence: CAG
gaacctgggaggcagaggtg

SEQ ID NO: 12222 - DNA, 20 bp, Artificial Sequence
  Description of Artificial Sequence: Synthetic oligonucleotide
  Target: ANGPTL4; (+) strand; PAM type: NRG; PAM sequence: GAG
ctgggaggcagaggtgcagt

SEQ ID NO: 12223 - DNA, 20 bp, Artificial Sequence
  Description of Artificial Sequence: Synthetic oligonucleotide
  Target: ANGPTL4; (+) strand; PAM type: NRG; PAM sequence: GAG
aggcagaggtgcagtgagcc

SEQ ID NO: 12224 - DNA, 20 bp, Artificial Sequence
  Description of Artificial Sequence: Synthetic oligonucleotide
  Target: ANGPTL4; (+) strand; PAM type: NRG; PAM sequence: CAG
gagattgtgccactgcactc

SEQ ID NO: 12225 - DNA, 20 bp, Artificial Sequence
  Description of Artificial Sequence: Synthetic oligonucleotide
  Target: ANGPTL4; (+) strand; PAM type: NRG; PAM sequence: TGG
tgtgccactgcactccagcc

SEQ ID NO: 12226 - DNA, 20 bp, Artificial Sequence
  Description of Artificial Sequence: Synthetic oligonucleotide
  Target: ANGPTL4; (+) strand; PAM type: NRG; PAM sequence: GGG
gtgccactgcactccagcct

SEQ ID NO: 12227 - DNA, 20 bp, Artificial Sequence
  Description of Artificial Sequence: Synthetic oligonucleotide
  Target: ANGPTL4; (+) strand; PAM type: NRG; PAM sequence: GAG
gccactgcactccagcctgg

SEQ ID NO: 12228 - DNA, 20 bp, Artificial Sequence
  Description of Artificial Sequence: Synthetic oligonucleotide
  Target: ANGPTL4; (+) strand; PAM type: NRG; PAM sequence: TAG
ctgcactccagcctgggaga

SEQ ID NO: 12229 - DNA, 20 bp, Artificial Sequence
  Description of Artificial Sequence: Synthetic oligonucleotide
  Target: ANGPTL4; (+) strand; PAM type: NRG; PAM sequence: GAG
gcactccagcctgggagata

SEQ ID NO: 12230 - DNA, 20 bp, Artificial Sequence
  Description of Artificial Sequence: Synthetic oligonucleotide
  Target: ANGPTL4; (+) strand; PAM type: NRG; PAM sequence: GAG
tccagcctgggagatagagt

SEQ ID NO: 12231 - DNA, 20 bp, Artificial Sequence
  Description of Artificial Sequence: Synthetic oligonucleotide
  Target: ANGPTL4; (+) strand; PAM type: NRG; PAM sequence: CAG
ctgggagatagagtgagact

SEQ ID NO: 12232 - DNA, 20 bp, Artificial Sequence
  Description of Artificial Sequence: Synthetic oligonucleotide
  Target: ANGPTL4; (+) strand; PAM type: NRG; PAM sequence: AAG
gagactcagtctcaaaaaaa

SEQ ID NO: 12233 - DNA, 20 bp, Artificial Sequence
  Description of Artificial Sequence: Synthetic oligonucleotide
  Target: ANGPTL4; (+) strand; PAM type: NRG; PAM sequence: TAG
caaaaaaaaagaccaaaaat

SEQ ID NO: 12234 - DNA, 20 bp, Artificial Sequence
  Description of Artificial Sequence: Synthetic oligonucleotide
  Target: ANGPTL4; (+) strand; PAM type: NRG; PAM sequence: CAG
aaaaaagaccaaaaattagc

SEQ ID NO: 12235 - DNA, 20 bp, Artificial Sequence
  Description of Artificial Sequence: Synthetic oligonucleotide
  Target: ANGPTL4; (+) strand; PAM type: NRG; PAM sequence: AGG
aaaaagaccaaaaattagcc

SEQ ID NO: 12236 - DNA, 20 bp, Artificial Sequence
  Description of Artificial Sequence: Synthetic oligonucleotide
  Target: ANGPTL4; (+) strand; PAM type: NRG; PAM sequence: TGG
gaccaaaaattagccaggtg

SEQ ID NO: 12237 - DNA, 20 bp, Artificial Sequence
  Description of Artificial Sequence: Synthetic oligonucleotide
  Target: ANGPTL4; (+) strand; PAM type: NRG; PAM sequence: TGG
caaaaattagccaggtgtgg

SEQ ID NO: 12238 - DNA, 20 bp, Artificial Sequence
  Description of Artificial Sequence: Synthetic oligonucleotide
  Target: ANGPTL4; (+) strand; PAM type: NRG; PAM sequence: CAG
aaattagccaggtgtggtgg

SEQ ID NO: 12239 - DNA, 20 bp, Artificial Sequence
  Description of Artificial Sequence: Synthetic oligonucleotide
  Target: ANGPTL4; (+) strand; PAM type: NRG; PAM sequence: AGG
aattagccaggtgtggtggc

SEQ ID NO: 12240 - DNA, 20 bp, Artificial Sequence
  Description of Artificial Sequence: Synthetic oligonucleotide
  Target: ANGPTL4; (+) strand; PAM type: NRG; PAM sequence: CAG
gtggcaggcgcctgtaatcc

SEQ ID NO: 12241 - DNA, 20 bp, Artificial Sequence
  Description of Artificial Sequence: Synthetic oligonucleotide
  Target: ANGPTL4; (+) strand; PAM type: NRG; PAM sequence: CGG
cgcctgtaatcccagctact

SEQ ID NO: 12242 - DNA, 20 bp, Artificial Sequence
  Description of Artificial Sequence: Synthetic oligonucleotide
  Target: ANGPTL4; (+) strand; PAM type: NRG; PAM sequence: GGG
gcctgtaatcccagctactc

SEQ ID NO: 12243 - DNA, 20 bp, Artificial Sequence
  Description of Artificial Sequence: Synthetic oligonucleotide
  Target: ANGPTL4; (+) strand; PAM type: NRG; PAM sequence: GAG
ctgtaatcccagctactcgg

SEQ ID NO: 12244 - DNA, 20 bp, Artificial Sequence
  Description of Artificial Sequence: Synthetic oligonucleotide
  Target: ANGPTL4; (+) strand; PAM type: NRG; PAM sequence: AGG
tgtaatcccagctactcggg

SEQ ID NO: 12245 - DNA, 20 bp, Artificial Sequence
  Description of Artificial Sequence: Synthetic oligonucleotide
  Target: ANGPTL4; (+) strand; PAM type: NRG; PAM sequence: GAG
tcccagctactcgggaggct

SEQ ID NO: 12246 - DNA, 20 bp, Artificial Sequence
  Description of Artificial Sequence: Synthetic oligonucleotide
  Target: ANGPTL4; (+) strand; PAM type: NRG; PAM sequence: AGG
cccagctactcgggaggctg

SEQ ID NO: 12247 - DNA, 20 bp, Artificial Sequence
  Description of Artificial Sequence: Synthetic oligonucleotide
  Target: ANGPTL4; (+) strand; PAM type: NRG; PAM sequence: GGG
ccagctactcgggaggctga

SEQ ID NO: 12248 - DNA, 20 bp, Artificial Sequence
  Description of Artificial Sequence: Synthetic oligonucleotide
  Target: ANGPTL4; (+) strand; PAM type: NRG; PAM sequence: GAG
agctactcgggaggctgagg

SEQ ID NO: 12249 - DNA, 20 bp, Artificial Sequence
  Description of Artificial Sequence: Synthetic oligonucleotide
  Target: ANGPTL4; (+) strand; PAM type: NRG; PAM sequence: AGG
gctactcgggaggctgaggg

SEQ ID NO: 12250 - DNA, 20 bp, Artificial Sequence
  Description of Artificial Sequence: Synthetic oligonucleotide
  Target: ANGPTL4; (+) strand; PAM type: NRG; PAM sequence: GAG
tactcgggaggctgagggag

SEQ ID NO: 12251 - DNA, 20 bp, Artificial Sequence
  Description of Artificial Sequence: Synthetic oligonucleotide
  Target: ANGPTL4; (+) strand; PAM type: NRG; PAM sequence: GAG
gaggagaatcacttaaacct

SEQ ID NO: 12252 - DNA, 20 bp, Artificial Sequence
  Description of Artificial Sequence: Synthetic oligonucleotide
  Target: ANGPTL4; (+) strand; PAM type: NRG; PAM sequence: GAG
ggagaatcacttaaacctga

SEQ ID NO: 12253 - DNA, 20 bp, Artificial Sequence
  Description of Artificial Sequence: Synthetic oligonucleotide
  Target: ANGPTL4; (+) strand; PAM type: NRG; PAM sequence: CGG
aatcacttaaacctgagaga

SEQ ID NO: 12254 - DNA, 20 bp, Artificial Sequence
  Description of Artificial Sequence: Synthetic oligonucleotide
  Target: ANGPTL4; (+) strand; PAM type: NRG; PAM sequence: GAG
tcacttaaacctgagagacg

SEQ ID NO: 12255 - DNA, 20 bp, Artificial Sequence
  Description of Artificial Sequence: Synthetic oligonucleotide
  Target: ANGPTL4; (+) strand; PAM type: NRG; PAM sequence: AGG
cacttaaacctgagagacgg

SEQ ID NO: 12256 - DNA, 20 bp, Artificial Sequence
  Description of Artificial Sequence: Synthetic oligonucleotide
  Target: ANGPTL4; (+) strand; PAM type: NRG; PAM sequence: CAG
aacctgagagacggaggttg

SEQ ID NO: 12257 - DNA, 20 bp, Artificial Sequence
  Description of Artificial Sequence: Synthetic oligonucleotide
  Target: ANGPTL4; (+) strand; PAM type: NRG; PAM sequence: GAG
tgagagacggaggttgcagt

SEQ ID NO: 12258 - DNA, 20 bp, Artificial Sequence
  Description of Artificial Sequence: Synthetic oligonucleotide
  Target: ANGPTL4; (+) strand; PAM type: NRG; PAM sequence: GAG
gacggaggttgcagtgagct

SEQ ID NO: 12259 - DNA, 20 bp, Artificial Sequence
  Description of Artificial Sequence: Synthetic oligonucleotide
  Target: ANGPTL4; (+) strand; PAM type: NRG; PAM sequence: CAG
gagatcgcaccactgcactc

SEQ ID NO: 12260 - DNA, 20 bp, Artificial Sequence
  Description of Artificial Sequence: Synthetic oligonucleotide
  Target: ANGPTL4; (+) strand; PAM type: NRG; PAM sequence: TGG
cgcaccactgcactccagcc

SEQ ID NO: 12261 - DNA, 20 bp, Artificial Sequence
  Description of Artificial Sequence: Synthetic oligonucleotide
  Target: ANGPTL4; (+) strand; PAM type: NRG; PAM sequence: GGG
gcaccactgcactccagcct

SEQ ID NO: 12262 - DNA, 20 bp, Artificial Sequence
  Description of Artificial Sequence: Synthetic oligonucleotide
  Target: ANGPTL4; (+) strand; PAM type: NRG; PAM sequence: CAG
ctgcactccagcctgggtga

SEQ ID NO: 12263 - DNA, 20 bp, Artificial Sequence
  Description of Artificial Sequence: Synthetic oligonucleotide
  Target: ANGPTL4; (+) strand; PAM type: NRG; PAM sequence: GAG
gcactccagcctgggtgaca

SEQ ID NO: 12264 - DNA, 20 bp, Artificial Sequence
  Description of Artificial Sequence: Synthetic oligonucleotide
  Target: ANGPTL4; (+) strand; PAM type: NRG; PAM sequence: AAG
tccagcctgggtgacagagt

SEQ ID NO: 12265 - DNA, 20 bp, Artificial Sequence
  Description of Artificial Sequence: Synthetic oligonucleotide
  Target: ANGPTL4; (+) strand; PAM type: NRG; PAM sequence: AAG
actcaatctcaaaaaaaaaa

SEQ ID NO: 12266 - DNA, 20 bp, Artificial Sequence
  Description of Artificial Sequence: Synthetic oligonucleotide
  Target: ANGPTL4; (+) strand; PAM type: NRG; PAM sequence: AAG
atctcaaaaaaaaaaaagtc

SEQ ID NO: 12267 - DNA, 20 bp, Artificial Sequence
  Description of Artificial Sequence: Synthetic oligonucleotide
  Target: ANGPTL4; (+) strand; PAM type: NRG; PAM sequence: AAG
aaaaaaaaaagtcaagtcca

SEQ ID NO: 12268 - DNA, 20 bp, Artificial Sequence
  Description of Artificial Sequence: Synthetic oligonucleotide
  Target: ANGPTL4; (+) strand; PAM type: NRG; PAM sequence: CAG
aaaaagtcaagtccaaagcc

SEQ ID NO: 12269 - DNA, 20 bp, Artificial Sequence
  Description of Artificial Sequence: Synthetic oligonucleotide
  Target: ANGPTL4; (+) strand; PAM type: NRG; PAM sequence: TGG
gtcaagtccaaagcccagcc

SEQ ID NO: 12270 - DNA, 20 bp, Artificial Sequence
  Description of Artificial Sequence: Synthetic oligonucleotide
  Target: ANGPTL4; (+) strand; PAM type: NRG; PAM sequence: CAG
accctatccctatctccttt

SEQ ID NO: 12271 - DNA, 20 bp, Artificial Sequence
  Description of Artificial Sequence: Synthetic oligonucleotide
  Target: ANGPTL4; (+) strand; PAM type: NRG; PAM sequence: CGG
ctatctcctttcagccccat

SEQ ID NO: 12272 - DNA, 20 bp, Artificial Sequence
  Description of Artificial Sequence: Synthetic oligonucleotide
  Target: ANGPTL4; (+) strand; PAM type: NRG; PAM sequence: TGG
tctcctttcagccccatcgg

SEQ ID NO: 12273 - DNA, 20 bp, Artificial Sequence
  Description of Artificial Sequence: Synthetic oligonucleotide
  Target: ANGPTL4; (+) strand; PAM type: NRG; PAM sequence: AAG
tcagccccatcggtggctca

SEQ ID NO: 12274 - DNA, 20 bp, Artificial Sequence
  Description of Artificial Sequence: Synthetic oligonucleotide
  Target: ANGPTL4; (+) strand; PAM type: NRG; PAM sequence: CGG
tgttccctctcccctgaccc

SEQ ID NO: 12275 - DNA, 20 bp, Artificial Sequence
  Description of Artificial Sequence: Synthetic oligonucleotide
  Target: ANGPTL4; (+) strand; PAM type: NRG; PAM sequence: CAG
tccctctcccctgaccccgg

SEQ ID NO: 12276 - DNA, 20 bp, Artificial Sequence
  Description of Artificial Sequence: Synthetic oligonucleotide
  Target: ANGPTL4; (+) strand; PAM type: NRG; PAM sequence: AGG
ccctctcccctgaccccggc

SEQ ID NO: 12277 - DNA, 20 bp, Artificial Sequence
  Description of Artificial Sequence: Synthetic oligonucleotide
  Target: ANGPTL4; (+) strand; PAM type: NRG; PAM sequence: GAG
ctctcccctgaccccggcag

SEQ ID NO: 12278 - DNA, 20 bp, Artificial Sequence
  Description of Artificial Sequence: Synthetic oligonucleotide
  Target: ANGPTL4; (+) strand; PAM type: NRG; PAM sequence: AGG
tctcccctgaccccggcagg

SEQ ID NO: 12279 - DNA, 20 bp, Artificial Sequence
  Description of Artificial Sequence: Synthetic oligonucleotide
  Target: ANGPTL4; (+) strand; PAM type: NRG; PAM sequence: TGG
ccctgaccccggcaggaggc

SEQ ID NO: 12280 - DNA, 20 bp, Artificial Sequence
  Description of Artificial Sequence: Synthetic oligonucleotide
  Target: ANGPTL4; (+) strand; PAM type: NRG; PAM sequence: TGG
tgaccccggcaggaggctgg

SEQ ID NO: 12281 - DNA, 20 bp, Artificial Sequence
  Description of Artificial Sequence: Synthetic oligonucleotide
  Target: ANGPTL4; (+) strand; PAM type: NRG; PAM sequence: TGG
ccggcaggaggctggtggtt

SEQ ID NO: 12282 - DNA, 20 bp, Artificial Sequence
  Description of Artificial Sequence: Synthetic oligonucleotide
  Target: ANGPTL4; (+) strand; PAM type: NRG; PAM sequence: CAG
ggctggtggtttggcacctg

SEQ ID NO: 12283 - DNA, 20 bp, Artificial Sequence
  Description of Artificial Sequence: Synthetic oligonucleotide
  Target: ANGPTL4; (+) strand; PAM type: NRG; PAM sequence: CGG
tgcagccattccaacctcaa

SEQ ID NO: 12284 - DNA, 20 bp, Artificial Sequence
  Description of Artificial Sequence: Synthetic oligonucleotide
  Target: ANGPTL4; (+) strand; PAM type: NRG; PAM sequence: CAG
gccattccaacctcaacggc

SEQ ID NO: 12285 - DNA, 20 bp, Artificial Sequence
  Description of Artificial Sequence: Synthetic oligonucleotide
  Target: ANGPTL4; (+) strand; PAM type: NRG; PAM sequence: CAG
agtacttccgctccatccca

SEQ ID NO: 12286 - DNA, 20 bp, Artificial Sequence
  Description of Artificial Sequence: Synthetic oligonucleotide
  Target: ANGPTL4; (+) strand; PAM type: NRG; PAM sequence: CAG
acttccgctccatcccacag

SEQ ID NO: 12287 - DNA, 20 bp, Artificial Sequence
  Description of Artificial Sequence: Synthetic oligonucleotide
  Target: ANGPTL4; (+) strand; PAM type: NRG; PAM sequence: CGG
tccgctccatcccacagcag

SEQ ID NO: 12288 - DNA, 20 bp, Artificial Sequence
  Description of Artificial Sequence: Synthetic oligonucleotide
  Target: ANGPTL4; (+) strand; PAM type: NRG; PAM sequence: CAG
gctccatcccacagcagcgg

SEQ ID NO: 12289 - DNA, 20 bp, Artificial Sequence
  Description of Artificial Sequence: Synthetic oligonucleotide
  Target: ANGPTL4; (+) strand; PAM type: NRG; PAM sequence: AAG
ccatcccacagcagcggcag

SEQ ID NO: 12290 - DNA, 20 bp, Artificial Sequence
  Description of Artificial Sequence: Synthetic oligonucleotide
  Target: ANGPTL4; (+) strand; PAM type: NRG; PAM sequence: AAG
cacagcagcggcagaagctt

SEQ ID NO: 12291 - DNA, 20 bp, Artificial Sequence
  Description of Artificial Sequence: Synthetic oligonucleotide
  Target: ANGPTL4; (+) strand; PAM type: NRG; PAM sequence: AAG
agcagcggcagaagcttaag

SEQ ID NO: 12292 - DNA, 20 bp, Artificial Sequence
  Description of Artificial Sequence: Synthetic oligonucleotide
  Target: ANGPTL4; (+) strand; PAM type: NRG; PAM sequence: AGG
gcagcggcagaagcttaaga

SEQ ID NO: 12293 - DNA, 20 bp, Artificial Sequence
  Description of Artificial Sequence: Synthetic oligonucleotide
  Target: ANGPTL4; (+) strand; PAM type: NRG; PAM sequence: GGG
cagcggcagaagcttaagaa

SEQ ID NO: 12294 - DNA, 20 bp, Artificial Sequence
  Description of Artificial Sequence: Synthetic oligonucleotide
  Target: ANGPTL4; (+) strand; PAM type: NRG; PAM sequence: TGG
agcttaagaagggaatcttc

SEQ ID NO: 12295 - DNA, 20 bp, Artificial Sequence
  Description of Artificial Sequence: Synthetic oligonucleotide
  Target: ANGPTL4; (+) strand; PAM type: NRG; PAM sequence: AAG
ttaagaagggaatcttctgg

SEQ ID NO: 12296 - DNA, 20 bp, Artificial Sequence
  Description of Artificial Sequence: Synthetic oligonucleotide
  Target: ANGPTL4; (+) strand; PAM type: NRG; PAM sequence: TGG
agggaatcttctggaagacc

SEQ ID NO: 12297 - DNA, 20 bp, Artificial Sequence
  Description of Artificial Sequence: Synthetic oligonucleotide
  Target: ANGPTL4; (+) strand; PAM type: NRG; PAM sequence: CGG
gaatcttctggaagacctgg

SEQ ID NO: 12298 - DNA, 20 bp, Artificial Sequence
  Description of Artificial Sequence: Synthetic oligonucleotide
  Target: ANGPTL4; (+) strand; PAM type: NRG; PAM sequence: GGG
aatcttctggaagacctggc

SEQ ID NO: 12299 - DNA, 20 bp, Artificial Sequence
  Description of Artificial Sequence: Synthetic oligonucleotide
  Target: ANGPTL4; (+) strand; PAM type: NRG; PAM sequence: GGG
atcttctggaagacctggcg

SEQ ID NO: 12300 - DNA, 20 bp, Artificial Sequence
  Description of Artificial Sequence: Synthetic oligonucleotide
  Target: ANGPTL4; (+) strand; PAM type: NRG; PAM sequence: CAG
ggggccgctactacccgctg

SEQ ID NO: 12301 - DNA, 20 bp, Artificial Sequence
  Description of Artificial Sequence: Synthetic oligonucleotide
  Target: ANGPTL4; (+) strand; PAM type: NRG; PAM sequence: AGG
gggccgctactacccgctgc

SEQ ID NO: 12302 - DNA, 20 bp, Artificial Sequence
  Description of Artificial Sequence: Synthetic oligonucleotide
  Target: ANGPTL4; (+) strand; PAM type: NRG; PAM sequence: CAG
aggccaccaccatgttgatc

SEQ ID NO: 12303 - DNA, 20 bp, Artificial Sequence
  Description of Artificial Sequence: Synthetic oligonucleotide
  Target: ANGPTL4; (+) strand; PAM type: NRG; PAM sequence: TGG
caccatgttgatccagccca

SEQ ID NO: 12304 - DNA, 20 bp, Artificial Sequence
  Description of Artificial Sequence: Synthetic oligonucleotide
  Target: ANGPTL4; (+) strand; PAM type: NRG; PAM sequence: CAG
catgttgatccagcccatgg

SEQ ID NO: 12305 - DNA, 20 bp, Artificial Sequence
  Description of Artificial Sequence: Synthetic oligonucleotide
  Target: ANGPTL4; (+) strand; PAM type: NRG; PAM sequence: CAG
gttgatccagcccatggcag

SEQ ID NO: 12306 - DNA, 20 bp, Artificial Sequence
  Description of Artificial Sequence: Synthetic oligonucleotide
  Target: ANGPTL4; (+) strand; PAM type: NRG; PAM sequence: GAG
tgatccagcccatggcagca

SEQ ID NO: 12307 - DNA, 20 bp, Artificial Sequence
  Description of Artificial Sequence: Synthetic oligonucleotide
  Target: ANGPTL4; (+) strand; PAM type: NRG; PAM sequence: AGG
gatccagcccatggcagcag

SEQ ID NO: 12308 - DNA, 20 bp, Artificial Sequence
  Description of Artificial Sequence: Synthetic oligonucleotide
  Target: ANGPTL4; (+) strand; PAM type: NRG; PAM sequence: CAG
ccagcccatggcagcagagg

SEQ ID NO: 12309 - DNA, 20 bp, Artificial Sequence
  Description of Artificial Sequence: Synthetic oligonucleotide
  Target: ANGPTL4; (+) strand; PAM type: NRG; PAM sequence: TAG
tggcagcagaggcagcctcc

SEQ ID NO: 12310 - DNA, 20 bp, Artificial Sequence
  Description of Artificial Sequence: Synthetic oligonucleotide
  Target: ANGPTL4; (+) strand; PAM type: NRG; PAM sequence: TGG
gaggcagcctcctagcgtcc

SEQ ID NO: 12311 - DNA, 20 bp, Artificial Sequence
  Description of Artificial Sequence: Synthetic oligonucleotide
  Target: ANGPTL4; (+) strand; PAM type: NRG; PAM sequence: TGG
cagcctcctagcgtcctggc

SEQ ID NO: 12312 - DNA, 20 bp, Artificial Sequence
  Description of Artificial Sequence: Synthetic oligonucleotide
  Target: ANGPTL4; (+) strand; PAM type: NRG; PAM sequence: GGG
agcctcctagcgtcctggct

SEQ ID NO: 12313 - DNA, 20 bp, Artificial Sequence
  Description of Artificial Sequence: Synthetic oligonucleotide
  Target: ANGPTL4; (+) strand; PAM type: NRG; PAM sequence: TGG
cctagcgtcctggctgggcc

SEQ ID NO: 12314 - DNA, 20 bp, Artificial Sequence
  Description of Artificial Sequence: Synthetic oligonucleotide
  Target: ANGPTL4; (+) strand; PAM type: NRG; PAM sequence: CAG
gtcctggctgggcctggtcc

SEQ ID NO: 12315 - DNA, 20 bp, Artificial Sequence
  Description of Artificial Sequence: Synthetic oligonucleotide
  Target: ANGPTL4; (+) strand; PAM type: NRG; PAM sequence: AGG
tcctggctgggcctggtccc

SEQ ID NO: 12316 - DNA, 20 bp, Artificial Sequence
  Description of Artificial Sequence: Synthetic oligonucleotide
  Target: ANGPTL4; (+) strand; PAM type: NRG; PAM sequence: AAG
gcctggtcccaggcccacga

SEQ ID NO: 12317 - DNA, 20 bp, Artificial Sequence
  Description of Artificial Sequence: Synthetic oligonucleotide
  Target: ANGPTL4; (+) strand; PAM type: NRG; PAM sequence: CGG
ggtcccaggcccacgaaaga

SEQ ID NO: 12318 - DNA, 20 bp, Artificial Sequence
  Description of Artificial Sequence: Synthetic oligonucleotide
  Target: ANGPTL4; (+) strand; PAM type: NRG; PAM sequence: TGG
ccacgaaagacggtgactct

SEQ ID NO: 12319 - DNA, 20 bp, Artificial Sequence
  Description of Artificial Sequence: Synthetic oligonucleotide
  Target: ANGPTL4; (+) strand; PAM type: NRG; PAM sequence: GAG
ggtgactcttggctctgccc

SEQ ID NO: 12320 - DNA, 20 bp, Artificial Sequence
  Description of Artificial Sequence: Synthetic oligonucleotide
  Target: ANGPTL4; (+) strand; PAM type: NRG; PAM sequence: AGG
gtgactcttggctctgcccg

SEQ ID NO: 12321 - DNA, 20 bp, Artificial Sequence
  Description of Artificial Sequence: Synthetic oligonucleotide
  Target: ANGPTL4; (+) strand; PAM type: NRG; PAM sequence: TGG
cttggctctgcccgaggatg

SEQ ID NO: 12322 - DNA, 20 bp, Artificial Sequence
  Description of Artificial Sequence: Synthetic oligonucleotide
  Target: ANGPTL4; (+) strand; PAM type: NRG; PAM sequence: TGG
ggatgtggccgttccctgcc

SEQ ID NO: 12323 - DNA, 20 bp, Artificial Sequence
  Description of Artificial Sequence: Synthetic oligonucleotide
  Target: ANGPTL4; (+) strand; PAM type: NRG; PAM sequence: GGG
gatgtggccgttccctgcct

SEQ ID NO: 12324 - DNA, 20 bp, Artificial Sequence
  Description of Artificial Sequence: Synthetic oligonucleotide
  Target: ANGPTL4; (+) strand; PAM type: NRG; PAM sequence: CAG
gtggccgttccctgcctggg

SEQ ID NO: 12325 - DNA, 20 bp, Artificial Sequence
  Description of Artificial Sequence: Synthetic oligonucleotide
  Target: ANGPTL4; (+) strand; PAM type: NRG; PAM sequence: AGG
tggccgttccctgcctgggc

SEQ ID NO: 12326 - DNA, 20 bp, Artificial Sequence
  Description of Artificial Sequence: Synthetic oligonucleotide
  Target: ANGPTL4; (+) strand; PAM type: NRG; PAM sequence: GGG
ggccgttccctgcctgggca

SEQ ID NO: 12327 - DNA, 20 bp, Artificial Sequence
  Description of Artificial Sequence: Synthetic oligonucleotide
  Target: ANGPTL4; (+) strand; PAM type: NRG; PAM sequence: GGG
gccgttccctgcctgggcag

SEQ ID NO: 12328 - DNA, 20 bp, Artificial Sequence
  Description of Artificial Sequence: Synthetic oligonucleotide
  Target: ANGPTL4; (+) strand; PAM type: NRG; PAM sequence: AAG
cctgcctgggcaggggctcc

SEQ ID NO: 12329 - DNA, 20 bp, Artificial Sequence
  Description of Artificial Sequence: Synthetic oligonucleotide
  Target: ANGPTL4; (+) strand; PAM type: NRG; PAM sequence: AGG
ctgcctgggcaggggctcca

SEQ ID NO: 12330 - DNA, 20 bp, Artificial Sequence
  Description of Artificial Sequence: Synthetic oligonucleotide
  Target: ANGPTL4; (+) strand; PAM type: NRG; PAM sequence: GAG
gcctgggcaggggctccaag

SEQ ID NO: 12331 - DNA, 20 bp, Artificial Sequence
  Description of Artificial Sequence: Synthetic oligonucleotide
  Target: ANGPTL4; (+) strand; PAM type: NRG; PAM sequence: AGG
cctgggcaggggctccaagg

SEQ ID NO: 12332 - DNA, 20 bp, Artificial Sequence
  Description of Artificial Sequence: Synthetic oligonucleotide
  Target: ANGPTL4; (+) strand; PAM type: NRG; PAM sequence: GGG
ctgggcaggggctccaagga

SEQ ID NO: 12333 - DNA, 20 bp, Artificial Sequence
  Description of Artificial Sequence: Synthetic oligonucleotide
  Target: ANGPTL4; (+) strand; PAM type: NRG; PAM sequence: GGG
tgggcaggggctccaaggag

SEQ ID NO: 12334 - DNA, 20 bp, Artificial Sequence
  Description of Artificial Sequence: Synthetic oligonucleotide
  Target: ANGPTL4; (+) strand; PAM type: NRG; PAM sequence: TGG
ggctccaaggaggggccatc

SEQ ID NO: 12335 - DNA, 20 bp, Artificial Sequence
  Description of Artificial Sequence: Synthetic oligonucleotide
  Target: ANGPTL4; (+) strand; PAM type: NRG; PAM sequence: TGG
aggggccatctggaaacttg

SEQ ID NO: 12336 - DNA, 20 bp, Artificial Sequence
  Description of Artificial Sequence: Synthetic oligonucleotide
  Target: ANGPTL4; (+) strand; PAM type: NRG; PAM sequence: CAG
gccatctggaaacttgtgga

SEQ ID NO: 12337 - DNA, 20 bp, Artificial Sequence
  Description of Artificial Sequence: Synthetic oligonucleotide
  Target: ANGPTL4; (+) strand; PAM type: NRG; PAM sequence: GAG
catctggaaacttgtggaca

SEQ ID NO: 12338 - DNA, 20 bp, Artificial Sequence
  Description of Artificial Sequence: Synthetic oligonucleotide
  Target: ANGPTL4; (+) strand; PAM type: NRG; PAM sequence: AAG
ctggaaacttgtggacagag

SEQ ID NO: 12339 - DNA, 20 bp, Artificial Sequence
  Description of Artificial Sequence: Synthetic oligonucleotide
  Target: ANGPTL4; (+) strand; PAM type: NRG; PAM sequence: AAG
gaaacttgtggacagagaag

SEQ ID NO: 12340 - DNA, 20 bp, Artificial Sequence
  Description of Artificial Sequence: Synthetic oligonucleotide
  Target: ANGPTL4; (+) strand; PAM type: NRG; PAM sequence: TGG
acagagaagaagaccacgac

SEQ ID NO: 12341 - DNA, 20 bp, Artificial Sequence
  Description of Artificial Sequence: Synthetic oligonucleotide
  Target: ANGPTL4; (+) strand; PAM type: NRG; PAM sequence: GAG
agagaagaagaccacgactg

SEQ ID NO: 12342 - DNA, 20 bp, Artificial Sequence
  Description of Artificial Sequence: Synthetic oligonucleotide
  Target: ANGPTL4; (+) strand; PAM type: NRG; PAM sequence: AAG
gaagaagaccacgactggag

SEQ ID NO: 12343 - DNA, 20 bp, Artificial Sequence
  Description of Artificial Sequence: Synthetic oligonucleotide
  Target: ANGPTL4; (+) strand; PAM type: NRG; PAM sequence: GAG
actggagaagccccctttct

SEQ ID NO: 12344 - DNA, 20 bp, Artificial Sequence
  Description of Artificial Sequence: Synthetic oligonucleotide
  Target: ANGPTL4; (+) strand; PAM type: NRG; PAM sequence: CAG
agaagccccctttctgagtg

SEQ ID NO: 12345 - DNA, 20 bp, Artificial Sequence
  Description of Artificial Sequence: Synthetic oligonucleotide
  Target: ANGPTL4; (+) strand; PAM type: NRG; PAM sequence: AGG
gaagccccctttctgagtgc

SEQ ID NO: 12346 - DNA, 20 bp, Artificial Sequence
  Description of Artificial Sequence: Synthetic oligonucleotide
  Target: ANGPTL4; (+) strand; PAM type: NRG; PAM sequence: GGG
aagccccctttctgagtgca

SEQ ID NO: 12347 - DNA, 20 bp, Artificial Sequence
  Description of Artificial Sequence: Synthetic oligonucleotide
  Target: ANGPTL4; (+) strand; PAM type: NRG; PAM sequence: GGG
agccccctttctgagtgcag

SEQ ID NO: 12348 - DNA, 20 bp, Artificial Sequence
  Description of Artificial Sequence: Synthetic oligonucleotide
  Target: ANGPTL4; (+) strand; PAM type: NRG; PAM sequence: GGG
gccccctttctgagtgcagg

SEQ ID NO: 12349 - DNA, 20 bp, Artificial Sequence
  Description of Artificial Sequence: Synthetic oligonucleotide
  Target: ANGPTL4; (+) strand; PAM type: NRG; PAM sequence: GGG
ccccctttctgagtgcaggg

SEQ ID NO: 12350 - DNA, 20 bp, Artificial Sequence
  Description of Artificial Sequence: Synthetic oligonucleotide
  Target: ANGPTL4; (+) strand; PAM type: NRG; PAM sequence: GAG
ggctgcatgcgttgcctcct

SEQ ID NO: 12351 - DNA, 20 bp, Artificial Sequence
  Description of Artificial Sequence: Synthetic oligonucleotide
  Target: ANGPTL4; (+) strand; PAM type: NRG; PAM sequence: GAG
atgcgttgcctcctgagatc

SEQ ID NO: 12352 - DNA, 20 bp, Artificial Sequence
  Description of Artificial Sequence: Synthetic oligonucleotide
  Target: ANGPTL4; (+) strand; PAM type: NRG; PAM sequence: AGG
tgcgttgcctcctgagatcg

SEQ ID NO: 12353 - DNA, 20 bp, Artificial Sequence
  Description of Artificial Sequence: Synthetic oligonucleotide
  Target: ANGPTL4; (+) strand; PAM type: NRG; PAM sequence: CAG
gcctcctgagatcgaggctg

SEQ ID NO: 12354 - DNA, 20 bp, Artificial Sequence
  Description of Artificial Sequence: Synthetic oligonucleotide
  Target: ANGPTL4; (+) strand; PAM type: NRG; PAM sequence: AGG
cctcctgagatcgaggctgc

SEQ ID NO: 12355 - DNA, 20 bp, Artificial Sequence
  Description of Artificial Sequence: Synthetic oligonucleotide
  Target: ANGPTL4; (+) strand; PAM type: NRG; PAM sequence: CAG
tcgaggctgcaggatatgct

SEQ ID NO: 12356 - DNA, 20 bp, Artificial Sequence
  Description of Artificial Sequence: Synthetic oligonucleotide
  Target: ANGPTL4; (+) strand; PAM type: NRG; PAM sequence: TAG
tgcaggatatgctcagactc

SEQ ID NO: 12357 - DNA, 20 bp, Artificial Sequence
  Description of Artificial Sequence: Synthetic oligonucleotide
  Target: ANGPTL4; (+) strand; PAM type: NRG; PAM sequence: GAG
caggatatgctcagactcta

SEQ ID NO: 12358 - DNA, 20 bp, Artificial Sequence
  Description of Artificial Sequence: Synthetic oligonucleotide
  Target: ANGPTL4; (+) strand; PAM type: NRG; PAM sequence: AGG
aggatatgctcagactctag

SEQ ID NO: 12359 - DNA, 20 bp, Artificial Sequence
  Description of Artificial Sequence: Synthetic oligonucleotide
  Target: ANGPTL4; (+) strand; PAM type: NRG; PAM sequence: TGG
atgctcagactctagaggcg

SEQ ID NO: 12360 - DNA, 20 bp, Artificial Sequence
  Description of Artificial Sequence: Synthetic oligonucleotide
  Target: ANGPTL4; (+) strand; PAM type: NRG; PAM sequence: AAG
agactctagaggcgtggacc

SEQ ID NO: 12361 - DNA, 20 bp, Artificial Sequence
  Description of Artificial Sequence: Synthetic oligonucleotide
  Target: ANGPTL4; (+) strand; PAM type: NRG; PAM sequence: AGG
gactctagaggcgtggacca

SEQ ID NO: 12362 - DNA, 20 bp, Artificial Sequence
  Description of Artificial Sequence: Synthetic oligonucleotide
  Target: ANGPTL4; (+) strand; PAM type: NRG; PAM sequence: GGG
actctagaggcgtggaccaa

SEQ ID NO: 12363 - DNA, 20 bp, Artificial Sequence
  Description of Artificial Sequence: Synthetic oligonucleotide
  Target: ANGPTL4; (+) strand; PAM type: NRG; PAM sequence: GGG
ctctagaggcgtggaccaag

SEQ ID NO: 12364 - DNA, 20 bp, Artificial Sequence
  Description of Artificial Sequence: Synthetic oligonucleotide
  Target: ANGPTL4; (+) strand; PAM type: NRG; PAM sequence: TGG
gaggcgtggaccaaggggca

SEQ ID NO: 12365 - DNA, 20 bp, Artificial Sequence
  Description of Artificial Sequence: Synthetic oligonucleotide
  Target: ANGPTL4; (+) strand; PAM type: NRG; PAM sequence: GAG
ggcgtggaccaaggggcatg

SEQ ID NO: 12366 - DNA, 20 bp, Artificial Sequence
  Description of Artificial Sequence: Synthetic oligonucleotide
  Target: ANGPTL4; (+) strand; PAM type: NRG; PAM sequence: TGG
catggagcttcactccttgc

SEQ ID NO: 12367 - DNA, 20 bp, Artificial Sequence
  Description of Artificial Sequence: Synthetic oligonucleotide
  Target: ANGPTL4; (+) strand; PAM type: NRG; PAM sequence: CAG
gagcttcactccttgctggc

SEQ ID NO: 12368 - DNA, 20 bp, Artificial Sequence
  Description of Artificial Sequence: Synthetic oligonucleotide
  Target: ANGPTL4; (+) strand; PAM type: NRG; PAM sequence: AGG
agcttcactccttgctggcc

SEQ ID NO: 12369 - DNA, 20 bp, Artificial Sequence
  Description of Artificial Sequence: Synthetic oligonucleotide
  Target: ANGPTL4; (+) strand; PAM type: NRG; PAM sequence: GGG
gcttcactccttgctggcca

SEQ ID NO: 12370 - DNA, 20 bp, Artificial Sequence
  Description of Artificial Sequence: Synthetic oligonucleotide
  Target: ANGPTL4; (+) strand; PAM type: NRG; PAM sequence: GAG
ttcactccttgctggccagg

SEQ ID NO: 12371 - DNA, 20 bp, Artificial Sequence
  Description of Artificial Sequence: Synthetic oligonucleotide
  Target: ANGPTL4; (+) strand; PAM type: NRG; PAM sequence: TGG
ctccttgctggccagggagt

SEQ ID NO: 12372 - DNA, 20 bp, Artificial Sequence
  Description of Artificial Sequence: Synthetic oligonucleotide
  Target: ANGPTL4; (+) strand; PAM type: NRG; PAM sequence: GGG
tccttgctggccagggagtt

SEQ ID NO: 12373 - DNA, 20 bp, Artificial Sequence
  Description of Artificial Sequence: Synthetic oligonucleotide
  Target: ANGPTL4; (+) strand; PAM type: NRG; PAM sequence: GGG
ccttgctggccagggagttg

SEQ ID NO: 12374 - DNA, 20 bp, Artificial Sequence
  Description of Artificial Sequence: Synthetic oligonucleotide
  Target: ANGPTL4; (+) strand; PAM type: NRG; PAM sequence: CAG
tggccagggagttggggact

SEQ ID NO: 12375 - DNA, 20 bp, Artificial Sequence
  Description of Artificial Sequence: Synthetic oligonucleotide
  Target: ANGPTL4; (+) strand; PAM type: NRG; PAM sequence: GAG
gccagggagttggggactca

SEQ ID NO: 12376 - DNA, 20 bp, Artificial Sequence
  Description of Artificial Sequence: Synthetic oligonucleotide
  Target: ANGPTL4; (+) strand; PAM type: NRG; PAM sequence: AGG
ccagggagttggggactcag

SEQ ID NO: 12377 - DNA, 20 bp, Artificial Sequence
  Description of Artificial Sequence: Synthetic oligonucleotide
  Target: ANGPTL4; (+) strand; PAM type: NRG; PAM sequence: GGG
cagggagttggggactcaga

SEQ ID NO: 12378 - DNA, 20 bp, Artificial Sequence
  Description of Artificial Sequence: Synthetic oligonucleotide
  Target: ANGPTL4; (+) strand; PAM type: NRG; PAM sequence: TGG
ggggactcagagggaccact

SEQ ID NO: 12379 - DNA, 20 bp, Artificial Sequence
  Description of Artificial Sequence: Synthetic oligonucleotide
  Target: ANGPTL4; (+) strand; PAM type: NRG; PAM sequence: GGG
gggactcagagggaccactt

SEQ ID NO: 12380 - DNA, 20 bp, Artificial Sequence
  Description of Artificial Sequence: Synthetic oligonucleotide
  Target: ANGPTL4; (+) strand; PAM type: NRG; PAM sequence: GGG
ggactcagagggaccacttg

SEQ ID NO: 12381 - DNA, 20 bp, Artificial Sequence
  Description of Artificial Sequence: Synthetic oligonucleotide
  Target: ANGPTL4; (+) strand; PAM type: NRG; PAM sequence: CAG
tcagagggaccacttggggc

SEQ ID NO: 12382 - DNA, 20 bp, Artificial Sequence
  Description of Artificial Sequence: Synthetic oligonucleotide
  Target: ANGPTL4; (+) strand; PAM type: NRG; PAM sequence: CAG
agggaccacttggggccagc

SEQ ID NO: 12383 - DNA, 20 bp, Artificial Sequence
  Description of Artificial Sequence: Synthetic oligonucleotide
  Target: ANGPTL4; (+) strand; PAM type: NRG; PAM sequence: TGG
ccacttggggccagccagac

SEQ ID NO: 12384 - DNA, 20 bp, Artificial Sequence
  Description of Artificial Sequence: Synthetic oligonucleotide
  Target: ANGPTL4; (+) strand; PAM type: NRG; PAM sequence: TGG
gccagccagactggcctcaa

SEQ ID NO: 12385 - DNA, 20 bp, Artificial Sequence
  Description of Artificial Sequence: Synthetic oligonucleotide
  Target: ANGPTL4; (+) strand; PAM type: NRG; PAM sequence: CGG
agccagactggcctcaatgg

SEQ ID NO: 12386 - DNA, 20 bp, Artificial Sequence
  Description of Artificial Sequence: Synthetic oligonucleotide
  Target: ANGPTL4; (+) strand; PAM type: NRG; PAM sequence: CAG
actggcctcaatggcggact

SEQ ID NO: 12387 - DNA, 20 bp, Artificial Sequence
  Description of Artificial Sequence: Synthetic oligonucleotide
  Target: ANGPTL4; (+) strand; PAM type: NRG; PAM sequence: CGG
gactcagtcacattgactga

SEQ ID NO: 12388 - DNA, 20 bp, Artificial Sequence
  Description of Artificial Sequence: Synthetic oligonucleotide
  Target: ANGPTL4; (+) strand; PAM type: NRG; PAM sequence: GGG
actcagtcacattgactgac

SEQ ID NO: 12389 - DNA, 20 bp, Artificial Sequence
  Description of Artificial Sequence: Synthetic oligonucleotide
  Target: ANGPTL4; (+) strand; PAM type: NRG; PAM sequence: GGG
ctcagtcacattgactgacg

SEQ ID NO: 12390 - DNA, 20 bp, Artificial Sequence
  Description of Artificial Sequence: Synthetic oligonucleotide
  Target: ANGPTL4; (+) strand; PAM type: NRG; PAM sequence: CAG
tcacattgactgacggggac

SEQ ID NO: 12391 - DNA, 20 bp, Artificial Sequence
  Description of Artificial Sequence: Synthetic oligonucleotide
  Target: ANGPTL4; (+) strand; PAM type: NRG; PAM sequence: AGG
cacattgactgacggggacc

SEQ ID NO: 12392 - DNA, 20 bp, Artificial Sequence
  Description of Artificial Sequence: Synthetic oligonucleotide
  Target: ANGPTL4; (+) strand; PAM type: NRG; PAM sequence: GGG
acattgactgacggggacca

SEQ ID NO: 12393 - DNA, 20 bp, Artificial Sequence
  Description of Artificial Sequence: Synthetic oligonucleotide
  Target: ANGPTL4; (+) strand; PAM type: NRG; PAM sequence: TGG
gacggggaccagggcttgtg

SEQ ID NO: 12394 - DNA, 20 bp, Artificial Sequence
  Description of Artificial Sequence: Synthetic oligonucleotide
  Target: ANGPTL4; (+) strand; PAM type: NRG; PAM sequence: GGG
acggggaccagggcttgtgt

SEQ ID NO: 12395 - DNA, 20 bp, Artificial Sequence
  Description of Artificial Sequence: Synthetic oligonucleotide
  Target: ANGPTL4; (+) strand; PAM type: NRG; PAM sequence: GAG
gaccagggcttgtgtgggtc

SEQ ID NO: 12396 - DNA, 20 bp, Artificial Sequence
  Description of Artificial Sequence: Synthetic oligonucleotide
  Target: ANGPTL4; (+) strand; PAM type: NRG; PAM sequence: GAG
ccagggcttgtgtgggtcga

SEQ ID NO: 12397 - DNA, 20 bp, Artificial Sequence
  Description of Artificial Sequence: Synthetic oligonucleotide
  Target: ANGPTL4; (+) strand; PAM type: NRG; PAM sequence: TGG
gtgggtcgagagcgccctca

SEQ ID NO: 12398 - DNA, 20 bp, Artificial Sequence
  Description of Artificial Sequence: Synthetic oligonucleotide
  Target: ANGPTL4; (+) strand; PAM type: NRG; PAM sequence: TGG
cgagagcgccctcatggtgc

SEQ ID NO: 12399 - DNA, 20 bp, Artificial Sequence
  Description of Artificial Sequence: Synthetic oligonucleotide
  Target: ANGPTL4; (+) strand; PAM type: NRG; PAM sequence: TAG
ggtgctggtgctgttgtgtg

SEQ ID NO: 12400 - DNA, 20 bp, Artificial Sequence
  Description of Artificial Sequence: Synthetic oligonucleotide
  Target: ANGPTL4; (+) strand; PAM type: NRG; PAM sequence: AGG
gtgctggtgctgttgtgtgt

SEQ ID NO: 12401 - DNA, 20 bp, Artificial Sequence
  Description of Artificial Sequence: Synthetic oligonucleotide
  Target: ANGPTL4; (+) strand; PAM type: NRG; PAM sequence: TGG
gctgttgtgtgtaggtcccc

SEQ ID NO: 12402 - DNA, 20 bp, Artificial Sequence
  Description of Artificial Sequence: Synthetic oligonucleotide
  Target: ANGPTL4; (+) strand; PAM type: NRG; PAM sequence: GGG
ctgttgtgtgtaggtcccct

SEQ ID NO: 12403 - DNA, 20 bp, Artificial Sequence
  Description of Artificial Sequence: Synthetic oligonucleotide
  Target: ANGPTL4; (+) strand; PAM type: NRG; PAM sequence: GGG
tgttgtgtgtaggtcccctg

SEQ ID NO: 12404 - DNA, 20 bp, Artificial Sequence
  Description of Artificial Sequence: Synthetic oligonucleotide
  Target: ANGPTL4; (+) strand; PAM type: NRG; PAM sequence: AAG
tgtaggtcccctggggacac

SEQ ID NO: 12405 - DNA, 20 bp, Artificial Sequence
  Description of Artificial Sequence: Synthetic oligonucleotide
  Target: ANGPTL4; (+) strand; PAM type: NRG; PAM sequence: CAG
aggtcccctggggacacaag

SEQ ID NO: 12406 - DNA, 20 bp, Artificial Sequence
  Description of Artificial Sequence: Synthetic oligonucleotide
  Target: ANGPTL4; (+) strand; PAM type: NRG; PAM sequence: AGG
ggtcccctggggacacaagc

SEQ ID NO: 12407 - DNA, 20 bp, Artificial Sequence
  Description of Artificial Sequence: Synthetic oligonucleotide
  Target: ANGPTL4; (+) strand; PAM type: NRG; PAM sequence: TGG
gggacacaagcaggcgccaa

SEQ ID NO: 12408 - DNA, 20 bp, Artificial Sequence
  Description of Artificial Sequence: Synthetic oligonucleotide
  Target: ANGPTL4; (+) strand; PAM type: NRG; PAM sequence: TGG
aagcaggcgccaatggtatc

SEQ ID NO: 12409 - DNA, 20 bp, Artificial Sequence
  Description of Artificial Sequence: Synthetic oligonucleotide
  Target: ANGPTL4; (+) strand; PAM type: NRG; PAM sequence: GGG
agcaggcgccaatggtatct

SEQ ID NO: 12410 - DNA, 20 bp, Artificial Sequence
  Description of Artificial Sequence: Synthetic oligonucleotide
  Target: ANGPTL4; (+) strand; PAM type: NRG; PAM sequence: CGG
aggcgccaatggtatctggg

SEQ ID NO: 12411 - DNA, 20 bp, Artificial Sequence
  Description of Artificial Sequence: Synthetic oligonucleotide
  Target: ANGPTL4; (+) strand; PAM type: NRG; PAM sequence: GAG
gcgccaatggtatctgggcg

SEQ ID NO: 12412 - DNA, 20 bp, Artificial Sequence
  Description of Artificial Sequence: Synthetic oligonucleotide
  Target: ANGPTL4; (+) strand; PAM type: NRG; PAM sequence: CAG
tggtatctgggcggagctca

SEQ ID NO: 12413 - DNA, 20 bp, Artificial Sequence
  Description of Artificial Sequence: Synthetic oligonucleotide
  Target: ANGPTL4; (+) strand; PAM type: NRG; PAM sequence: GAG
gtatctgggcggagctcaca

SEQ ID NO: 12414 - DNA, 20 bp, Artificial Sequence
  Description of Artificial Sequence: Synthetic oligonucleotide
  Target: ANGPTL4; (+) strand; PAM type: NRG; PAM sequence: TGG
ggcggagctcacagagttct

SEQ ID NO: 12415 - DNA, 20 bp, Artificial Sequence
  Description of Artificial Sequence: Synthetic oligonucleotide
  Target: ANGPTL4; (+) strand; PAM type: NRG; PAM sequence: AAG
tcacagagttcttggaataa

SEQ ID NO: 12416 - DNA, 20 bp, Artificial Sequence
  Description of Artificial Sequence: Synthetic oligonucleotide
  Target: ANGPTL4; (+) strand; PAM type: NRG; PAM sequence: CAG
tcttggaataaaagcaacct

SEQ ID NO: 12417 - DNA, 20 bp, Artificial Sequence
  Description of Artificial Sequence: Synthetic oligonucleotide
  Target: ANGPTL4; (+) strand; PAM type: NRG; PAM sequence: TAG
ttcttttttttctctttctt

SEQ ID NO: 12418 - DNA, 20 bp, Artificial Sequence
  Description of Artificial Sequence: Synthetic oligonucleotide
  Target: ANGPTL4; (+) strand; PAM type: NRG; PAM sequence: CAG
ttttctctttctttagttca

SEQ ID NO: 12419 - DNA, 20 bp, Artificial Sequence
  Description of Artificial Sequence: Synthetic oligonucleotide
  Target: ANGPTL4; (+) strand; PAM type: NRG; PAM sequence: TAG
ctttctttagttcacagatc

SEQ ID NO: 12420 - DNA, 20 bp, Artificial Sequence
  Description of Artificial Sequence: Synthetic oligonucleotide
  Target: ANGPTL4; (+) strand; PAM type: NRG; PAM sequence: AAG
ctttagttcacagatctagt

SEQ ID NO: 12421 - DNA, 20 bp, Artificial Sequence
  Description of Artificial Sequence: Synthetic oligonucleotide
  Target: ANGPTL4; (+) strand; PAM type: NRG; PAM sequence: CAG
cagatctagtaagttaccct

SEQ ID NO: 12422 - DNA, 20 bp, Artificial Sequence
  Description of Artificial Sequence: Synthetic oligonucleotide
  Target: ANGPTL4; (+) strand; PAM type: NRG; PAM sequence: AAG
taccctcagtttgttttaaa

SEQ ID NO: 12423 - DNA, 20 bp, Artificial Sequence
  Description of Artificial Sequence: Synthetic oligonucleotide
  Target: ANGPTL4; (+) strand; PAM type: NRG; PAM sequence: AAG
tttgttttaaaaagtgaaca

SEQ ID NO: 12424 - DNA, 20 bp, Artificial Sequence
  Description of Artificial Sequence: Synthetic oligonucleotide
  Target: ANGPTL4; (+) strand; PAM type: NRG; PAM sequence: CAG
agtccatgtaaacatgttcc

SEQ ID NO: 12425 - DNA, 20 bp, Artificial Sequence
  Description of Artificial Sequence: Synthetic oligonucleotide
  Target: ANGPTL4; (+) strand; PAM type: NRG; PAM sequence: AGG
gtccatgtaaacatgttccc

SEQ ID NO: 12426 - DNA, 20 bp, Artificial Sequence
  Description of Artificial Sequence: Synthetic oligonucleotide
  Target: ANGPTL4; (+) strand; PAM type: NRG; PAM sequence: GGG
tccatgtaaacatgttccca

SEQ ID NO: 12427 - DNA, 20 bp, Artificial Sequence
  Description of Artificial Sequence: Synthetic oligonucleotide
  Target: ANGPTL4; (+) strand; PAM type: NRG; PAM sequence: CAG
tgtaaacatgttcccagggc

SEQ ID NO: 12428 - DNA, 20 bp, Artificial Sequence
  Description of Artificial Sequence: Synthetic oligonucleotide
  Target: ANGPTL4; (+) strand; PAM type: NRG; PAM sequence: AGG
gtaaacatgttcccagggcc

SEQ ID NO: 12429 - DNA, 20 bp, Artificial Sequence
  Description of Artificial Sequence: Synthetic oligonucleotide
  Target: ANGPTL4; (+) strand; PAM type: NRG; PAM sequence: CGG
catgttcccagggccaggca

SEQ ID NO: 12430 - DNA, 20 bp, Artificial Sequence
  Description of Artificial Sequence: Synthetic oligonucleotide
  Target: ANGPTL4; (+) strand; PAM type: NRG; PAM sequence: CAG
gtgtctcgtgcctgtaatcc

SEQ ID NO: 12431 - DNA, 20 bp, Artificial Sequence
  Description of Artificial Sequence: Synthetic oligonucleotide
  Target: ANGPTL4; (+) strand; PAM type: NRG; PAM sequence: GAG
ctgtaatcccagccatttgt

SEQ ID NO: 12432 - DNA, 20 bp, Artificial Sequence
  Description of Artificial Sequence: Synthetic oligonucleotide
  Target: ANGPTL4; (+) strand; PAM type: NRG; PAM sequence: AGG
tgtaatcccagccatttgtg

SEQ ID NO: 12433 - DNA, 20 bp, Artificial Sequence
  Description of Artificial Sequence: Synthetic oligonucleotide
  Target: ANGPTL4; (+) strand; PAM type: NRG; PAM sequence: GAG
tcccagccatttgtgaggcc

SEQ ID NO: 12434 - DNA, 20 bp, Artificial Sequence
  Description of Artificial Sequence: Synthetic oligonucleotide
  Target: ANGPTL4; (+) strand; PAM type: NRG; PAM sequence: CAG
agccatttgtgaggccgaga

SEQ ID NO: 12435 - DNA, 20 bp, Artificial Sequence
  Description of Artificial Sequence: Synthetic oligonucleotide
  Target: ANGPTL4; (+) strand; PAM type: NRG; PAM sequence: AGG
gccatttgtgaggccgagac

SEQ ID NO: 12436 - DNA, 20 bp, Artificial Sequence
  Description of Artificial Sequence: Synthetic oligonucleotide
  Target: ANGPTL4; (+) strand; PAM type: NRG; PAM sequence: CAG
atttgtgaggccgagacagg

SEQ ID NO: 12437 - DNA, 20 bp, Artificial Sequence
  Description of Artificial Sequence: Synthetic oligonucleotide
  Target: ANGPTL4; (+) strand; PAM type: NRG; PAM sequence: AGG
tttgtgaggccgagacaggc

SEQ ID NO: 12438 - DNA, 20 bp, Artificial Sequence
  Description of Artificial Sequence: Synthetic oligonucleotide
  Target: ANGPTL4; (+) strand; PAM type: NRG; PAM sequence: GAG
ccgagacaggcaggtcactt

SEQ ID NO: 12439 - DNA, 20 bp, Artificial Sequence
  Description of Artificial Sequence: Synthetic oligonucleotide
  Target: ANGPTL4; (+) strand; PAM type: NRG; PAM sequence: AGG
cgagacaggcaggtcacttg

SEQ ID NO: 12440 - DNA, 20 bp, Artificial Sequence
  Description of Artificial Sequence: Synthetic oligonucleotide
  Target: ANGPTL4; (+) strand; PAM type: NRG; PAM sequence: CAG
acaggcaggtcacttgaggt

SEQ ID NO: 12441 - DNA, 20 bp, Artificial Sequence
  Description of Artificial Sequence: Synthetic oligonucleotide
  Target: ANGPTL4; (+) strand; PAM type: NRG; PAM sequence: CAG
ggcaggtcacttgaggtcag

SEQ ID NO: 12442 - DNA, 20 bp, Artificial Sequence
  Description of Artificial Sequence: Synthetic oligonucleotide
  Target: ANGPTL4; (+) strand; PAM type: NRG; PAM sequence: GAG
tcacttgaggtcagcagttc

SEQ ID NO: 12443 - DNA, 20 bp, Artificial Sequence
  Description of Artificial Sequence: Synthetic oligonucleotide
  Target: ANGPTL4; (+) strand; PAM type: NRG; PAM sequence: CAG
tgaggtcagcagttcgagac

SEQ ID NO: 12444 - DNA, 20 bp, Artificial Sequence
  Description of Artificial Sequence: Synthetic oligonucleotide
  Target: ANGPTL4; (+) strand; PAM type: NRG; PAM sequence: CGG
gtcagcagttcgagaccagc

SEQ ID NO: 12445 - DNA, 20 bp, Artificial Sequence
  Description of Artificial Sequence: Synthetic oligonucleotide
  Target: ANGPTL4; (+) strand; PAM type: NRG; PAM sequence: GGG
tcagcagttcgagaccagcc

SEQ ID NO: 12446 - DNA, 20 bp, Artificial Sequence
  Description of Artificial Sequence: Synthetic oligonucleotide
  Target: ANGPTL4; (+) strand; PAM type: NRG; PAM sequence: TGG
cgagaccagccgggccaaca

SEQ ID NO: 12447 - DNA, 20 bp, Artificial Sequence
  Description of Artificial Sequence: Synthetic oligonucleotide
  Target: ANGPTL4; (+) strand; PAM type: NRG; PAM sequence: TGG
gaccagccgggccaacatgg

SEQ ID NO: 12448 - DNA, 20 bp, Artificial Sequence
  Description of Artificial Sequence: Synthetic oligonucleotide
  Target: ANGPTL4; (+) strand; PAM type: NRG; PAM sequence: TAG
ctacaaaaaaatacaaaaat

SEQ ID NO: 12449 - DNA, 20 bp, Artificial Sequence
  Description of Artificial Sequence: Synthetic oligonucleotide
  Target: ANGPTL4; (+) strand; PAM type: NRG; PAM sequence: GAG
aaaaaatacaaaaattagcc

SEQ ID NO: 12450 - DNA, 20 bp, Artificial Sequence
  Description of Artificial Sequence: Synthetic oligonucleotide
  Target: ANGPTL4; (+) strand; PAM type: NRG; PAM sequence: TGG
atacaaaaattagccgagca

SEQ ID NO: 12451 - DNA, 20 bp, Artificial Sequence
  Description of Artificial Sequence: Synthetic oligonucleotide
  Target: ANGPTL4; (+) strand; PAM type: NRG; PAM sequence: TGG
caaaaattagccgagcatgg

SEQ ID NO: 12452 - DNA, 20 bp, Artificial Sequence
  Description of Artificial Sequence: Synthetic oligonucleotide
  Target: ANGPTL4; (+) strand; PAM type: NRG; PAM sequence: TAG
agcatggtggtgcacgtctg

SEQ ID NO: 12453 - DNA, 20 bp, Artificial Sequence
  Description of Artificial Sequence: Synthetic oligonucleotide
  Target: ANGPTL4; (+) strand; PAM type: NRG; PAM sequence: CAG
gtggtgcacgtctgtagtcc

SEQ ID NO: 12454 - DNA, 20 bp, Artificial Sequence
  Description of Artificial Sequence: Synthetic oligonucleotide
  Target: ANGPTL4; (+) strand; PAM type: NRG; PAM sequence: TAG
gtctgtagtcccagctactc

SEQ ID NO: 12455 - DNA, 20 bp, Artificial Sequence
  Description of Artificial Sequence: Synthetic oligonucleotide
  Target: ANGPTL4; (+) strand; PAM type: NRG; PAM sequence: GAG
ctgtagtcccagctactcta

SEQ ID NO: 12456 - DNA, 20 bp, Artificial Sequence
  Description of Artificial Sequence: Synthetic oligonucleotide
  Target: ANGPTL4; (+) strand; PAM type: NRG; PAM sequence: AGG
tgtagtcccagctactctag

SEQ ID NO: 12457 - DNA, 20 bp, Artificial Sequence
  Description of Artificial Sequence: Synthetic oligonucleotide
  Target: ANGPTL4; (+) strand; PAM type: NRG; PAM sequence: CAG
agctactctagaggctgacg

SEQ ID NO: 12458 - DNA, 20 bp, Artificial Sequence
  Description of Artificial Sequence: Synthetic oligonucleotide
  Target: ANGPTL4; (+) strand; PAM type: NRG; PAM sequence: AAG
tactctagaggctgacgcag

SEQ ID NO: 12459 - DNA, 20 bp, Artificial Sequence
  Description of Artificial Sequence: Synthetic oligonucleotide
  Target: ANGPTL4; (+) strand; PAM type: NRG; PAM sequence: GAG
ctgacgcagaagaatcactt

SEQ ID NO: 12460 - DNA, 20 bp, Artificial Sequence
  Description of Artificial Sequence: Synthetic oligonucleotide
  Target: ANGPTL4; (+) strand; PAM type: NRG; PAM sequence: AAG
gcagaagaatcacttgagcc

SEQ ID NO: 12461 - DNA, 20 bp, Artificial Sequence
  Description of Artificial Sequence: Synthetic oligonucleotide
  Target: ANGPTL4; (+) strand; PAM type: NRG; PAM sequence: AGG
cagaagaatcacttgagcca

SEQ ID NO: 12462 - DNA, 20 bp, Artificial Sequence
  Description of Artificial Sequence: Synthetic oligonucleotide
  Target: ANGPTL4; (+) strand; PAM type: NRG; PAM sequence: GAG
gaagaatcacttgagccaag

SEQ ID NO: 12463 - DNA, 20 bp, Artificial Sequence
  Description of Artificial Sequence: Synthetic oligonucleotide
  Target: ANGPTL4; (+) strand; PAM type: NRG; PAM sequence: AGG
aagaatcacttgagccaagg

SEQ ID NO: 12464 - DNA, 20 bp, Artificial Sequence
  Description of Artificial Sequence: Synthetic oligonucleotide
  Target: ANGPTL4; (+) strand; PAM type: NRG; PAM sequence: CAG
aatcacttgagccaaggagg

SEQ ID NO: 12465 - DNA, 20 bp, Artificial Sequence
  Description of Artificial Sequence: Synthetic oligonucleotide
  Target: ANGPTL4; (+) strand; PAM type: NRG; PAM sequence: GAG
tcacttgagccaaggaggca

SEQ ID NO: 12466 - DNA, 20 bp, Artificial Sequence
  Description of Artificial Sequence: Synthetic oligonucleotide
  Target: ANGPTL4; (+) strand; PAM type: NRG; PAM sequence: AGG
cacttgagccaaggaggcag

SEQ ID NO: 12467 - DNA, 20 bp, Artificial Sequence
  Description of Artificial Sequence: Synthetic oligonucleotide
  Target: ANGPTL4; (+) strand; PAM type: NRG; PAM sequence: AAG
aggaggcagaggctgcaaat

SEQ ID NO: 12468 - DNA, 20 bp, Artificial Sequence
  Description of Artificial Sequence: Synthetic oligonucleotide
  Target: ANGPTL4; (+) strand; PAM type: NRG; PAM sequence: GAG
gcagaggctgcaaataagcc

SEQ ID NO: 12469 - DNA, 20 bp, Artificial Sequence
  Description of Artificial Sequence: Synthetic oligonucleotide
  Target: ANGPTL4; (+) strand; PAM type: NRG; PAM sequence: CAG
gagattgcgccactgcactc

SEQ ID NO: 12470 - DNA, 20 bp, Artificial Sequence
  Description of Artificial Sequence: Synthetic oligonucleotide
  Target: ANGPTL4; (+) strand; PAM type: NRG; PAM sequence: TGG
tgcgccactgcactccagcc

SEQ ID NO: 12471 - DNA, 20 bp, Artificial Sequence
  Description of Artificial Sequence: Synthetic oligonucleotide
  Target: ANGPTL4; (+) strand; PAM type: NRG; PAM sequence: GGG
gcgccactgcactccagcct

SEQ ID NO: 12472 - DNA, 20 bp, Artificial Sequence
  Description of Artificial Sequence: Synthetic oligonucleotide
  Target: ANGPTL4; (+) strand; PAM type: NRG; PAM sequence: CAG
ctgcactccagcctgggcaa

SEQ ID NO: 12473 - DNA, 20 bp, Artificial Sequence
  Description of Artificial Sequence: Synthetic oligonucleotide
  Target: ANGPTL4; (+) strand; PAM type: NRG; PAM sequence: GAG
gcactccagcctgggcaaca

SEQ ID NO: 12474 - DNA, 20 bp, Artificial Sequence
  Description of Artificial Sequence: Synthetic oligonucleotide
  Target: ANGPTL4; (+) strand; PAM type: NRG; PAM sequence: AAG
tccagcctgggcaacagagc

SEQ ID NO: 12475 - DNA, 20 bp, Artificial Sequence
  Description of Artificial Sequence: Synthetic oligonucleotide
  Target: ANGPTL4; (+) strand; PAM type: NRG; PAM sequence: TAG
caaaaataatttttttttcg

SEQ ID NO: 12476 - DNA, 20 bp, Artificial Sequence
  Description of Artificial Sequence: Synthetic oligonucleotide
  Target: ANGPTL4; (+) strand; PAM type: NRG; PAM sequence: GAG
aaaataatttttttttcgta

SEQ ID NO: 12477 - DNA, 20 bp, Artificial Sequence
  Description of Artificial Sequence: Synthetic oligonucleotide
  Target: ANGPTL4; (+) strand; PAM type: NRG; PAM sequence: AGG
aaataatttttttttcgtag

SEQ ID NO: 12478 - DNA, 20 bp, Artificial Sequence
  Description of Artificial Sequence: Synthetic oligonucleotide
  Target: ANGPTL4; (+) strand; PAM type: NRG; PAM sequence: CAG
taatttttttttcgtagagg

SEQ ID NO: 12479 - DNA, 20 bp, Artificial Sequence
  Description of Artificial Sequence: Synthetic oligonucleotide
  Target: ANGPTL4; (+) strand; PAM type: NRG; PAM sequence: AGG
aatttttttttcgtagaggc

SEQ ID NO: 12480 - DNA, 20 bp, Artificial Sequence
  Description of Artificial Sequence: Synthetic oligonucleotide
  Target: ANGPTL4; (+) strand; PAM type: NRG; PAM sequence: GGG
atttttttttcgtagaggca

SEQ ID NO: 12481 - DNA, 20 bp, Artificial Sequence
  Description of Artificial Sequence: Synthetic oligonucleotide
  Target: ANGPTL4; (+) strand; PAM type: NRG; PAM sequence: CAG
cagggtctcattctattgtc

SEQ ID NO: 12482 - DNA, 20 bp, Artificial Sequence
  Description of Artificial Sequence: Synthetic oligonucleotide
  Target: ANGPTL4; (+) strand; PAM type: NRG; PAM sequence: AGG
agggtctcattctattgtcc

SEQ ID NO: 12483 - DNA, 20 bp, Artificial Sequence
  Description of Artificial Sequence: Synthetic oligonucleotide
  Target: ANGPTL4; (+) strand; PAM type: NRG; PAM sequence: TGG
tctcattctattgtccaggc

SEQ ID NO: 12484 - DNA, 20 bp, Artificial Sequence
  Description of Artificial Sequence: Synthetic oligonucleotide
  Target: ANGPTL4; (+) strand; PAM type: NRG; PAM sequence: GAG
ccaggctggtctcaaacacc

SEQ ID NO: 12485 - DNA, 20 bp, Artificial Sequence
  Description of Artificial Sequence: Synthetic oligonucleotide
  Target: ANGPTL4; (+) strand; PAM type: NRG; PAM sequence: AAG
ggtctcaaacaccgagactc

SEQ ID NO: 12486 - DNA, 20 bp, Artificial Sequence
  Description of Artificial Sequence: Synthetic oligonucleotide
  Target: ANGPTL4; (+) strand; PAM type: NRG; PAM sequence: AGG
gtctcaaacaccgagactca

SEQ ID NO: 12487 - DNA, 20 bp, Artificial Sequence
  Description of Artificial Sequence: Synthetic oligonucleotide
  Target: ANGPTL4; (+) strand; PAM type: NRG; PAM sequence: GGG
tctcaaacaccgagactcaa

SEQ ID NO: 12488 - DNA, 20 bp, Artificial Sequence
  Description of Artificial Sequence: Synthetic oligonucleotide
  Target: ANGPTL4; (+) strand; PAM type: NRG; PAM sequence: TGG
ctcaagggatcctcctgcct

SEQ ID NO: 12489 - DNA, 20 bp, Artificial Sequence
  Description of Artificial Sequence: Synthetic oligonucleotide
  Target: ANGPTL4; (+) strand; PAM type: NRG; PAM sequence: AAG
cctcctgccttggcttcaca

SEQ ID NO: 12490 - DNA, 20 bp, Artificial Sequence
  Description of Artificial Sequence: Synthetic oligonucleotide
  Target: ANGPTL4; (+) strand; PAM type: NRG; PAM sequence: TGG
gccttggcttcacaaagtga

SEQ ID NO: 12491 - DNA, 20 bp, Artificial Sequence
  Description of Artificial Sequence: Synthetic oligonucleotide
  Target: ANGPTL4; (+) strand; PAM type: NRG; PAM sequence: GGG
ccttggcttcacaaagtgat

SEQ ID NO: 12492 - DNA, 20 bp, Artificial Sequence
  Description of Artificial Sequence: Synthetic oligonucleotide
  Target: ANGPTL4; (+) strand; PAM type: NRG; PAM sequence: AAG
ttcacaaagtgatgggatta

SEQ ID NO: 12493 - DNA, 20 bp, Artificial Sequence
  Description of Artificial Sequence: Synthetic oligonucleotide
  Target: ANGPTL4; (+) strand; PAM type: NRG; PAM sequence: AGG
tcacaaagtgatgggattaa

SEQ ID NO: 12494 - DNA, 20 bp, Artificial Sequence
  Description of Artificial Sequence: Synthetic oligonucleotide
  Target: ANGPTL4; (+) strand; PAM type: NRG; PAM sequence: GAG
agtgatgggattaaaggtgt

SEQ ID NO: 12495 - DNA, 20 bp, Artificial Sequence
  Description of Artificial Sequence: Synthetic oligonucleotide
  Target: ANGPTL4; (+) strand; PAM type: NRG; PAM sequence: AAG
cgccactgcacccacccctg

SEQ ID NO: 12496 - DNA, 20 bp, Artificial Sequence
  Description of Artificial Sequence: Synthetic oligonucleotide
  Target: ANGPTL4; (+) strand; PAM type: NRG; PAM sequence: AGG
gccactgcacccacccctga

SEQ ID NO: 12497 - DNA, 20 bp, Artificial Sequence
  Description of Artificial Sequence: Synthetic oligonucleotide
  Target: ANGPTL4; (+) strand; PAM type: NRG; PAM sequence: AAG
tttgttaaaaaaaaaaaaaa

SEQ ID NO: 12498 - DNA, 20 bp, Artificial Sequence
  Description of Artificial Sequence: Synthetic oligonucleotide
  Target: ANGPTL4; (+) strand; PAM type: NRG; PAM sequence: TGG
ttaaaaaaaaaaaaaaaaga

SEQ ID NO: 12499 - DNA, 20 bp, Artificial Sequence
  Description of Artificial Sequence: Synthetic oligonucleotide
  Target: ANGPTL4; (+) strand; PAM type: NRG; PAM sequence: TGG
aaaaaaaaaaaaagatggcg

SEQ ID NO: 12500 - DNA, 20 bp, Artificial Sequence
  Description of Artificial Sequence: Synthetic oligonucleotide
  Target: ANGPTL4; (+) strand; PAM type: NRG; PAM sequence: CAG
gtcgctcatgcctgtaatcc

SEQ ID NO: 12501 - DNA, 20 bp, Artificial Sequence
  Description of Artificial Sequence: Synthetic oligonucleotide
  Target: ANGPTL4; (+) strand; PAM type: NRG; PAM sequence: TAG
tgcctgtaatcccagcactt

SEQ ID NO: 12502 - DNA, 20 bp, Artificial Sequence
  Description of Artificial Sequence: Synthetic oligonucleotide
  Target: ANGPTL4; (+) strand; PAM type: NRG; PAM sequence: AGG
gcctgtaatcccagcacttt

SEQ ID NO: 12503 - DNA, 20 bp, Artificial Sequence
  Description of Artificial Sequence: Synthetic oligonucleotide
  Target: ANGPTL4; (+) strand; PAM type: NRG; PAM sequence: GAG
ctgtaatcccagcactttag

SEQ ID NO: 12504 - DNA, 20 bp, Artificial Sequence
  Description of Artificial Sequence: Synthetic oligonucleotide
  Target: ANGPTL4; (+) strand; PAM type: NRG; PAM sequence: AGG
tgtaatcccagcactttagg

SEQ ID NO: 12505 - DNA, 20 bp, Artificial Sequence
  Description of Artificial Sequence: Synthetic oligonucleotide
  Target: ANGPTL4; (+) strand; PAM type: NRG; PAM sequence: GAG
tcccagcactttaggaggcc

SEQ ID NO: 12506 - DNA, 20 bp, Artificial Sequence
  Description of Artificial Sequence: Synthetic oligonucleotide
  Target: ANGPTL4; (+) strand; PAM type: NRG; PAM sequence: AGG
cccagcactttaggaggccg

SEQ ID NO: 12507 - DNA, 20 bp, Artificial Sequence
  Description of Artificial Sequence: Synthetic oligonucleotide
  Target: ANGPTL4; (+) strand; PAM type: NRG; PAM sequence: CAG
agcactttaggaggccgagg

SEQ ID NO: 12508 - DNA, 20 bp, Artificial Sequence
  Description of Artificial Sequence: Synthetic oligonucleotide
  Target: ANGPTL4; (+) strand; PAM type: NRG; PAM sequence: AGG
gcactttaggaggccgaggc

SEQ ID NO: 12509 - DNA, 20 bp, Artificial Sequence
  Description of Artificial Sequence: Synthetic oligonucleotide
  Target: ANGPTL4; (+) strand; PAM type: NRG; PAM sequence: TGG
ctttaggaggccgaggcagg

SEQ ID NO: 12510 - DNA, 20 bp, Artificial Sequence
  Description of Artificial Sequence: Synthetic oligonucleotide
  Target: ANGPTL4; (+) strand; PAM type: NRG; PAM sequence: GAG
ggtggatcatctgacattac

SEQ ID NO: 12511 - DNA, 20 bp, Artificial Sequence
  Description of Artificial Sequence: Synthetic oligonucleotide
  Target: ANGPTL4; (+) strand; PAM type: NRG; PAM sequence: CAG
tcatctgacattacgagttc

SEQ ID NO: 12512 - DNA, 20 bp, Artificial Sequence
  Description of Artificial Sequence: Synthetic oligonucleotide
  Target: ANGPTL4; (+) strand; PAM type: NRG; PAM sequence: AGG
catctgacattacgagttcc

SEQ ID NO: 12513 - DNA, 20 bp, Artificial Sequence
  Description of Artificial Sequence: Synthetic oligonucleotide
  Target: ANGPTL4; (+) strand; PAM type: NRG; PAM sequence: TGG
ccaggcccgcctgaccaaca

SEQ ID NO: 12514 - DNA, 20 bp, Artificial Sequence
  Description of Artificial Sequence: Synthetic oligonucleotide
  Target: ANGPTL4; (+) strand; PAM type: NRG; PAM sequence: TAG
tctactaaaaatacaaaaat

SEQ ID NO: 12515 - DNA, 20 bp, Artificial Sequence
  Description of Artificial Sequence: Synthetic oligonucleotide
  Target: ANGPTL4; (+) strand; PAM type: NRG; PAM sequence: CGG
ctaaaaatacaaaaattagc

SEQ ID NO: 12516 - DNA, 20 bp, Artificial Sequence
  Description of Artificial Sequence: Synthetic oligonucleotide
  Target: ANGPTL4; (+) strand; PAM type: NRG; PAM sequence: GGG
taaaaatacaaaaattagcc

SEQ ID NO: 12517 - DNA, 20 bp, Artificial Sequence
  Description of Artificial Sequence: Synthetic oligonucleotide
  Target: ANGPTL4; (+) strand; PAM type: NRG; PAM sequence: TGG
atacaaaaattagccgggtg

SEQ ID NO: 12518 - DNA, 20 bp, Artificial Sequence
  Description of Artificial Sequence: Synthetic oligonucleotide
  Target: ANGPTL4; (+) strand; PAM type: NRG; PAM sequence: TGG
caaaaattagccgggtgtgg

SEQ ID NO: 12519 - DNA, 20 bp, Artificial Sequence
  Description of Artificial Sequence: Synthetic oligonucleotide
  Target: ANGPTL4; (+) strand; PAM type: NRG; PAM sequence: CGG
aaattagccgggtgtggtgg

SEQ ID NO: 12520 - DNA, 20 bp, Artificial Sequence
  Description of Artificial Sequence: Synthetic oligonucleotide
  Target: ANGPTL4; (+) strand; PAM type: NRG; PAM sequence: GGG
aattagccgggtgtggtggc

SEQ ID NO: 12521 - DNA, 20 bp, Artificial Sequence
  Description of Artificial Sequence: Synthetic oligonucleotide
  Target: ANGPTL4; (+) strand; PAM type: NRG; PAM sequence: CAG
gtggcgggtgcctgtaatcc

SEQ ID NO: 12522 - DNA, 20 bp, Artificial Sequence
  Description of Artificial Sequence: Synthetic oligonucleotide
  Target: ANGPTL4; (+) strand; PAM type: NRG; PAM sequence: CAG
tgcctgtaatcccagctact

SEQ ID NO: 12523 - DNA, 20 bp, Artificial Sequence
  Description of Artificial Sequence: Synthetic oligonucleotide
  Target: ANGPTL4; (+) strand; PAM type: NRG; PAM sequence: AGG
gcctgtaatcccagctactc

SEQ ID NO: 12524 - DNA, 20 bp, Artificial Sequence
  Description of Artificial Sequence: Synthetic oligonucleotide
  Target: ANGPTL4; (+) strand; PAM type: NRG; PAM sequence: GAG
ctgtaatcccagctactcag

SEQ ID NO: 12525 - DNA, 20 bp, Artificial Sequence
  Description of Artificial Sequence: Synthetic oligonucleotide
  Target: ANGPTL4; (+) strand; PAM type: NRG; PAM sequence: AGG
tgtaatcccagctactcagg

SEQ ID NO: 12526 - DNA, 20 bp, Artificial Sequence
  Description of Artificial Sequence: Synthetic oligonucleotide
  Target: ANGPTL4; (+) strand; PAM type: NRG; PAM sequence: GAG
tcccagctactcaggaggct

SEQ ID NO: 12527 - DNA, 20 bp, Artificial Sequence
  Description of Artificial Sequence: Synthetic oligonucleotide
  Target: ANGPTL4; (+) strand; PAM type: NRG; PAM sequence: AGG
cccagctactcaggaggctg

SEQ ID NO: 12528 - DNA, 20 bp, Artificial Sequence
  Description of Artificial Sequence: Synthetic oligonucleotide
  Target: ANGPTL4; (+) strand; PAM type: NRG; PAM sequence: CAG
agctactcaggaggctgagg

SEQ ID NO: 12529 - DNA, 20 bp, Artificial Sequence
  Description of Artificial Sequence: Synthetic oligonucleotide
  Target: ANGPTL4; (+) strand; PAM type: NRG; PAM sequence: AGG
gctactcaggaggctgaggc

SEQ ID NO: 12530 - DNA, 20 bp, Artificial Sequence
  Description of Artificial Sequence: Synthetic oligonucleotide
  Target: ANGPTL4; (+) strand; PAM type: NRG; PAM sequence: GAG
tactcaggaggctgaggcag

SEQ ID NO: 12531 - DNA, 20 bp, Artificial Sequence
  Description of Artificial Sequence: Synthetic oligonucleotide
  Target: ANGPTL4; (+) strand; PAM type: NRG; PAM sequence: CGG
gcaggagaatcacttgaact

SEQ ID NO: 12532 - DNA, 20 bp, Artificial Sequence
  Description of Artificial Sequence: Synthetic oligonucleotide
  Target: ANGPTL4; (+) strand; PAM type: NRG; PAM sequence: GGG
caggagaatcacttgaactc

SEQ ID NO: 12533 - DNA, 20 bp, Artificial Sequence
  Description of Artificial Sequence: Synthetic oligonucleotide
  Target: ANGPTL4; (+) strand; PAM type: NRG; PAM sequence: GAG
ggagaatcacttgaactcgg

SEQ ID NO: 12534 - DNA, 20 bp, Artificial Sequence
  Description of Artificial Sequence: Synthetic oligonucleotide
  Target: ANGPTL4; (+) strand; PAM type: NRG; PAM sequence: AGG
gagaatcacttgaactcggg

SEQ ID NO: 12535 - DNA, 20 bp, Artificial Sequence
  Description of Artificial Sequence: Synthetic oligonucleotide
  Target: ANGPTL4; (+) strand; PAM type: NRG; PAM sequence: TGG
aatcacttgaactcgggagg

SEQ ID NO: 12536 - DNA, 20 bp, Artificial Sequence
  Description of Artificial Sequence: Synthetic oligonucleotide
  Target: ANGPTL4; (+) strand; PAM type: NRG; PAM sequence: GAG
tcacttgaactcgggaggtg

SEQ ID NO: 12537 - DNA, 20 bp, Artificial Sequence
  Description of Artificial Sequence: Synthetic oligonucleotide
  Target: ANGPTL4; (+) strand; PAM type: NRG; PAM sequence: AGG
cacttgaactcgggaggtgg

SEQ ID NO: 12538 - DNA, 20 bp, Artificial Sequence
  Description of Artificial Sequence: Synthetic oligonucleotide
  Target: ANGPTL4; (+) strand; PAM type: NRG; PAM sequence: CGG
aactcgggaggtggaggttg

SEQ ID NO: 12539 - DNA, 20 bp, Artificial Sequence
  Description of Artificial Sequence: Synthetic oligonucleotide
  Target: ANGPTL4; (+) strand; PAM type: NRG; PAM sequence: GAG
cgggaggtggaggttgcggt

SEQ ID NO: 12540 - DNA, 20 bp, Artificial Sequence
  Description of Artificial Sequence: Synthetic oligonucleotide
  Target: ANGPTL4; (+) strand; PAM type: NRG; PAM sequence: CAG
gaggtggaggttgcggtgag

SEQ ID NO: 12541 - DNA, 20 bp, Artificial Sequence
  Description of Artificial Sequence: Synthetic oligonucleotide
  Target: ANGPTL4; (+) strand; PAM type: NRG; PAM sequence: GAG
ggtggaggttgcggtgagca

SEQ ID NO: 12542 - DNA, 20 bp, Artificial Sequence
  Description of Artificial Sequence: Synthetic oligonucleotide
  Target: ANGPTL4; (+) strand; PAM type: NRG; PAM sequence: CAG
gagatcatgccactgcactc

SEQ ID NO: 12543 - DNA, 20 bp, Artificial Sequence
  Description of Artificial Sequence: Synthetic oligonucleotide
  Target: ANGPTL4; (+) strand; PAM type: NRG; PAM sequence: TGG
catgccactgcactccagcc

SEQ ID NO: 12544 - DNA, 20 bp, Artificial Sequence
  Description of Artificial Sequence: Synthetic oligonucleotide
  Target: ANGPTL4; (+) strand; PAM type: NRG; PAM sequence: GGG
atgccactgcactccagcct

SEQ ID NO: 12545 - DNA, 20 bp, Artificial Sequence
  Description of Artificial Sequence: Synthetic oligonucleotide
  Target: ANGPTL4; (+) strand; PAM type: NRG; PAM sequence: CAG
ctgcactccagcctgggtga

SEQ ID NO: 12546 - DNA, 20 bp, Artificial Sequence
  Description of Artificial Sequence: Synthetic oligonucleotide
  Target: ANGPTL4; (+) strand; PAM type: NRG; PAM sequence: GAG
gcactccagcctgggtgaca

SEQ ID NO: 12547 - DNA, 20 bp, Artificial Sequence
  Description of Artificial Sequence: Synthetic oligonucleotide
  Target: ANGPTL4; (+) strand; PAM type: NRG; PAM sequence: AAG
tccagcctgggtgacagagc

SEQ ID NO: 12548 - DNA, 20 bp, Artificial Sequence
  Description of Artificial Sequence: Synthetic oligonucleotide
  Target: ANGPTL4; (+) strand; PAM type: NRG; PAM sequence: AAG
aaaaaaaaaaaaaaaaaaaa

SEQ ID NO: 12549 - DNA, 20 bp, Artificial Sequence
  Description of Artificial Sequence: Synthetic oligonucleotide
  Target: ANGPTL4; (+) strand; PAM type: NRG; PAM sequence: TAG
aaaaaaaaaaaaaaaaagaa

SEQ ID NO: 12550 - DNA, 20 bp, Artificial Sequence
  Description of Artificial Sequence: Synthetic oligonucleotide
  Target: ANGPTL4; (+) strand; PAM type: NRG; PAM sequence: AGG
aaaaaaaaaaaaaaaagaat

SEQ ID NO: 12551 - DNA, 20 bp, Artificial Sequence
  Description of Artificial Sequence: Synthetic oligonucleotide
  Target: ANGPTL4; (+) strand; PAM type: NRG; PAM sequence: GGG
aaaaaaaaaaaaaaagaata

SEQ ID NO: 12552 - DNA, 20 bp, Artificial Sequence
  Description of Artificial Sequence: Synthetic oligonucleotide
  Target: ANGPTL4; (+) strand; PAM type: NRG; PAM sequence: TGG
aaaaaaaaaaagaatagggc

SEQ ID NO: 12553 - DNA, 20 bp, Artificial Sequence
  Description of Artificial Sequence: Synthetic oligonucleotide
  Target: ANGPTL4; (+) strand; PAM type: NRG; PAM sequence: GGG
aaaaaaaaaagaatagggct

SEQ ID NO: 12554 - DNA, 20 bp, Artificial Sequence
  Description of Artificial Sequence: Synthetic oligonucleotide
  Target: ANGPTL4; (+) strand; PAM type: NRG; PAM sequence: TGG
aagaatagggctgggcgcat

SEQ ID NO: 12555 - DNA, 20 bp, Artificial Sequence
  Description of Artificial Sequence: Synthetic oligonucleotide
  Target: ANGPTL4; (+) strand; PAM type: NRG; PAM sequence: TAG
ttggctcacacttgtaacac

SEQ ID NO: 12556 - DNA, 20 bp, Artificial Sequence
  Description of Artificial Sequence: Synthetic oligonucleotide
  Target: ANGPTL4; (+) strand; PAM type: NRG; PAM sequence: TGG
cacttgtaacactagcactt

SEQ ID NO: 12557 - DNA, 20 bp, Artificial Sequence
  Description of Artificial Sequence: Synthetic oligonucleotide
  Target: ANGPTL4; (+) strand; PAM type: NRG; PAM sequence: GGG
acttgtaacactagcacttt

SEQ ID NO: 12558 - DNA, 20 bp, Artificial Sequence
  Description of Artificial Sequence: Synthetic oligonucleotide
  Target: ANGPTL4; (+) strand; PAM type: NRG; PAM sequence: GAG
ttgtaacactagcactttgg

SEQ ID NO: 12559 - DNA, 20 bp, Artificial Sequence
  Description of Artificial Sequence: Synthetic oligonucleotide
  Target: ANGPTL4; (+) strand; PAM type: NRG; PAM sequence: AGG
tgtaacactagcactttggg

SEQ ID NO: 12560 - DNA, 20 bp, Artificial Sequence
  Description of Artificial Sequence: Synthetic oligonucleotide
  Target: ANGPTL4; (+) strand; PAM type: NRG; PAM sequence: GAG
tagcactttgggaggccaac

SEQ ID NO: 12561 - DNA, 20 bp, Artificial Sequence
  Description of Artificial Sequence: Synthetic oligonucleotide
  Target: ANGPTL4; (+) strand; PAM type: NRG; PAM sequence: CGG
cactttgggaggccaacgag

SEQ ID NO: 12562 - DNA, 20 bp, Artificial Sequence
  Description of Artificial Sequence: Synthetic oligonucleotide
  Target: ANGPTL4; (+) strand; PAM type: NRG; PAM sequence: GAG
ggccaacgagcggatcaccc

SEQ ID NO: 12563 - DNA, 20 bp, Artificial Sequence
  Description of Artificial Sequence: Synthetic oligonucleotide
  Target: ANGPTL4; (+) strand; PAM type: NRG; PAM sequence: AGG
gccaacgagcggatcacccg

SEQ ID NO: 12564 - DNA, 20 bp, Artificial Sequence
  Description of Artificial Sequence: Synthetic oligonucleotide
  Target: ANGPTL4; (+) strand; PAM type: NRG; PAM sequence: CGG
acgagcggatcacccgaggt

SEQ ID NO: 12565 - DNA, 20 bp, Artificial Sequence
  Description of Artificial Sequence: Synthetic oligonucleotide
  Target: ANGPTL4; (+) strand; PAM type: NRG; PAM sequence: GGG
cgagcggatcacccgaggtc

SEQ ID NO: 12566 - DNA, 20 bp, Artificial Sequence
  Description of Artificial Sequence: Synthetic oligonucleotide
  Target: ANGPTL4; (+) strand; PAM type: NRG; PAM sequence: TAG
tcccgctgtattgctctata

SEQ ID NO: 12567 - DNA, 20 bp, Artificial Sequence
  Description of Artificial Sequence: Synthetic oligonucleotide
  Target: ANGPTL4; (+) strand; PAM type: NRG; PAM sequence: GAG
gctgtattgctctatatagt

SEQ ID NO: 12568 - DNA, 20 bp, Artificial Sequence
  Description of Artificial Sequence: Synthetic oligonucleotide
  Target: ANGPTL4; (+) strand; PAM type: NRG; PAM sequence: TAG
tatatagtgagatccctata

SEQ ID NO: 12569 - DNA, 20 bp, Artificial Sequence
  Description of Artificial Sequence: Synthetic oligonucleotide
  Target: ANGPTL4; (+) strand; PAM type: NRG; PAM sequence: AGG
atatagtgagatccctatat

SEQ ID NO: 12570 - DNA, 20 bp, Artificial Sequence
  Description of Artificial Sequence: Synthetic oligonucleotide
  Target: ANGPTL4; (+) strand; PAM type: NRG; PAM sequence: GGG
tatagtgagatccctatata

SEQ ID NO: 12571 - DNA, 20 bp, Artificial Sequence
  Description of Artificial Sequence: Synthetic oligonucleotide
  Target: ANGPTL4; (+) strand; PAM type: NRG; PAM sequence: CAG
tagggtctcactctattgtc

SEQ ID NO: 12572 - DNA, 20 bp, Artificial Sequence
  Description of Artificial Sequence: Synthetic oligonucleotide
  Target: ANGPTL4; (+) strand; PAM type: NRG; PAM sequence: AGG
agggtctcactctattgtcc

SEQ ID NO: 12573 - DNA, 20 bp, Artificial Sequence
  Description of Artificial Sequence: Synthetic oligonucleotide
  Target: ANGPTL4; (+) strand; PAM type: NRG; PAM sequence: TGG
tctcactctattgtccaggc

SEQ ID NO: 12574 - DNA, 20 bp, Artificial Sequence
  Description of Artificial Sequence: Synthetic oligonucleotide
  Target: ANGPTL4; (+) strand; PAM type: NRG; PAM sequence: TGG
ctctattgtccaggctggtc

SEQ ID NO: 12575 - DNA, 20 bp, Artificial Sequence
  Description of Artificial Sequence: Synthetic oligonucleotide
  Target: ANGPTL4; (+) strand; PAM type: NRG; PAM sequence: TGG
ttgtccaggctggtctggcc

SEQ ID NO: 12576 - DNA, 20 bp, Artificial Sequence
  Description of Artificial Sequence: Synthetic oligonucleotide
  Target: ANGPTL4; (+) strand; PAM type: NRG; PAM sequence: TGG
ctggtctggcctggccaatg

SEQ ID NO: 12577 - DNA, 20 bp, Artificial Sequence
  Description of Artificial Sequence: Synthetic oligonucleotide
  Target: ANGPTL4; (+) strand; PAM type: NRG; PAM sequence: TAG
tctactaaaaatacaaaaat

SEQ ID NO: 12578 - DNA, 20 bp, Artificial Sequence
  Description of Artificial Sequence: Synthetic oligonucleotide
  Target: ANGPTL4; (+) strand; PAM type: NRG; PAM sequence: TGG
ctaaaaatacaaaaattagc

SEQ ID NO: 12579 - DNA, 20 bp, Artificial Sequence
  Description of Artificial Sequence: Synthetic oligonucleotide
  Target: ANGPTL4; (+) strand; PAM type: NRG; PAM sequence: GGG
taaaaatacaaaaattagct

SEQ ID NO: 12580 - DNA, 20 bp, Artificial Sequence
  Description of Artificial Sequence: Synthetic oligonucleotide
  Target: ANGPTL4; (+) strand; PAM type: NRG; PAM sequence: TAG
atacaaaaattagctgggca

SEQ ID NO: 12581 - DNA, 20 bp, Artificial Sequence
  Description of Artificial Sequence: Synthetic oligonucleotide
  Target: ANGPTL4; (+) strand; PAM type: NRG; PAM sequence: CAG
gtgatgcgcacctataatcc

SEQ ID NO: 12582 - DNA, 20 bp, Artificial Sequence
  Description of Artificial Sequence: Synthetic oligonucleotide
  Target: ANGPTL4; (+) strand; PAM type: NRG; PAM sequence: CAG
cacctataatcccagctact

SEQ ID NO: 12583 - DNA, 20 bp, Artificial Sequence
  Description of Artificial Sequence: Synthetic oligonucleotide
  Target: ANGPTL4; (+) strand; PAM type: NRG; PAM sequence: AGG
acctataatcccagctactc

SEQ ID NO: 12584 - DNA, 20 bp, Artificial Sequence
  Description of Artificial Sequence: Synthetic oligonucleotide
  Target: ANGPTL4; (+) strand; PAM type: NRG; PAM sequence: GAG
ctataatcccagctactcag

SEQ ID NO: 12585 - DNA, 20 bp, Artificial Sequence
  Description of Artificial Sequence: Synthetic oligonucleotide
  Target: ANGPTL4; (+) strand; PAM type: NRG; PAM sequence: AGG
tataatcccagctactcagg

SEQ ID NO: 12586 - DNA, 20 bp, Artificial Sequence
  Description of Artificial Sequence: Synthetic oligonucleotide
  Target: ANGPTL4; (+) strand; PAM type: NRG; PAM sequence: GAG
tcccagctactcaggaggct

SEQ ID NO: 12587 - DNA, 20 bp, Artificial Sequence
  Description of Artificial Sequence: Synthetic oligonucleotide
  Target: ANGPTL4; (+) strand; PAM type: NRG; PAM sequence: AGG
cccagctactcaggaggctg

SEQ ID NO: 12588 - DNA, 20 bp, Artificial Sequence
  Description of Artificial Sequence: Synthetic oligonucleotide
  Target: ANGPTL4; (+) strand; PAM type: NRG; PAM sequence: CGG
gctactcaggaggctgaggc

SEQ ID NO: 12589 - DNA, 20 bp, Artificial Sequence
  Description of Artificial Sequence: Synthetic oligonucleotide
  Target: ANGPTL4; (+) strand; PAM type: NRG; PAM sequence: GAG
tactcaggaggctgaggccg

SEQ ID NO: 12590 - DNA, 20 bp, Artificial Sequence
  Description of Artificial Sequence: Synthetic oligonucleotide
  Target: ANGPTL4; (+) strand; PAM type: NRG; PAM sequence: CAG
gccggagaattgcttgaacc

SEQ ID NO: 12591 - DNA, 20 bp, Artificial Sequence
  Description of Artificial Sequence: Synthetic oligonucleotide
  Target: ANGPTL4; (+) strand; PAM type: NRG; PAM sequence: AGG
ccggagaattgcttgaaccc

SEQ ID NO: 12592 - DNA, 20 bp, Artificial Sequence
  Description of Artificial Sequence: Synthetic oligonucleotide
  Target: ANGPTL4; (+) strand; PAM type: NRG; PAM sequence: GAG
ggagaattgcttgaacccag

SEQ ID NO: 12593 - DNA, 20 bp, Artificial Sequence
  Description of Artificial Sequence: Synthetic oligonucleotide
  Target: ANGPTL4; (+) strand; PAM type: NRG; PAM sequence: AGG
gagaattgcttgaacccagg

SEQ ID NO: 12594 - DNA, 20 bp, Artificial Sequence
  Description of Artificial Sequence: Synthetic oligonucleotide
  Target: ANGPTL4; (+) strand; PAM type: NRG; PAM sequence: TGG
aattgcttgaacccaggagg

SEQ ID NO: 12595 - DNA, 20 bp, Artificial Sequence
  Description of Artificial Sequence: Synthetic oligonucleotide
  Target: ANGPTL4; (+) strand; PAM type: NRG; PAM sequence: GAG
ttgcttgaacccaggaggtg

SEQ ID NO: 12596 - DNA, 20 bp, Artificial Sequence
  Description of Artificial Sequence: Synthetic oligonucleotide
  Target: ANGPTL4; (+) strand; PAM type: NRG; PAM sequence: AGG
tgcttgaacccaggaggtgg

SEQ ID NO: 12597 - DNA, 20 bp, Artificial Sequence
  Description of Artificial Sequence: Synthetic oligonucleotide
  Target: ANGPTL4; (+) strand; PAM type: NRG; PAM sequence: CAG
aacccaggaggtggaggttg

SEQ ID NO: 12598 - DNA, 20 bp, Artificial Sequence
  Description of Artificial Sequence: Synthetic oligonucleotide
  Target: ANGPTL4; (+) strand; PAM type: NRG; PAM sequence: GAG
caggaggtggaggttgcagt

SEQ ID NO: 12599 - DNA, 20 bp, Artificial Sequence
  Description of Artificial Sequence: Synthetic oligonucleotide
  Target: ANGPTL4; (+) strand; PAM type: NRG; PAM sequence: GAG
ggtggaggttgcagtgagcc

SEQ ID NO: 12600 - DNA, 20 bp, Artificial Sequence
  Description of Artificial Sequence: Synthetic oligonucleotide
  Target: ANGPTL4; (+) strand; PAM type: NRG; PAM sequence: TGG
gaggttgcagtgagccgaga

SEQ ID NO: 12601 - DNA, 20 bp, Artificial Sequence
  Description of Artificial Sequence: Synthetic oligonucleotide
  Target: ANGPTL4; (+) strand; PAM type: NRG; PAM sequence: GAG
cagtgagccgagatggcgct

SEQ ID NO: 12602 - DNA, 20 bp, Artificial Sequence
  Description of Artificial Sequence: Synthetic oligonucleotide
  Target: ANGPTL4; (+) strand; PAM type: NRG; PAM sequence: GAG
gtgagccgagatggcgctga

SEQ ID NO: 12603 - DNA, 20 bp, Artificial Sequence
  Description of Artificial Sequence: Synthetic oligonucleotide
  Target: ANGPTL4; (+) strand; PAM type: NRG; PAM sequence: AGG
tgagccgagatggcgctgag

SEQ ID NO: 12604 - DNA, 20 bp, Artificial Sequence
  Description of Artificial Sequence: Synthetic oligonucleotide
  Target: ANGPTL4; (+) strand; PAM type: NRG; PAM sequence: CAG
gagatggcgctgagaggtga

SEQ ID NO: 12605 - DNA, 20 bp, Artificial Sequence
  Description of Artificial Sequence: Synthetic oligonucleotide
  Target: ANGPTL4; (+) strand; PAM type: NRG; PAM sequence: TGG
gctgagaggtgacagcgtgc

SEQ ID NO: 12606 - DNA, 20 bp, Artificial Sequence
  Description of Artificial Sequence: Synthetic oligonucleotide
  Target: ANGPTL4; (+) strand; PAM type: NRG; PAM sequence: CAG
gagaggtgacagcgtgctgg

SEQ ID NO: 12607 - DNA, 20 bp, Artificial Sequence
  Description of Artificial Sequence: Synthetic oligonucleotide
  Target: ANGPTL4; (+) strand; PAM type: NRG; PAM sequence: CAG
cagcgtgctggcagtcctca

SEQ ID NO: 12608 - DNA, 20 bp, Artificial Sequence
  Description of Artificial Sequence: Synthetic oligonucleotide
  Target: ANGPTL4; (+) strand; PAM type: NRG; PAM sequence: TGG
ctctctgcgactcctctgcc

SEQ ID NO: 12609 - DNA, 20 bp, Artificial Sequence
  Description of Artificial Sequence: Synthetic oligonucleotide
  Target: ANGPTL4; (+) strand; PAM type: NRG; PAM sequence: GGG
tctctgcgactcctctgcct

SEQ ID NO: 12610 - DNA, 20 bp, Artificial Sequence
  Description of Artificial Sequence: Synthetic oligonucleotide
  Target: ANGPTL4; (+) strand; PAM type: NRG; PAM sequence: TGG
ctctgcctgggctcccactg

SEQ ID NO: 12611 - DNA, 20 bp, Artificial Sequence
  Description of Artificial Sequence: Synthetic oligonucleotide
  Target: ANGPTL4; (+) strand; PAM type: NRG; PAM sequence: CGG
tgcctgggctcccactgtgg

SEQ ID NO: 12612 - DNA, 20 bp, Artificial Sequence
  Description of Artificial Sequence: Synthetic oligonucleotide
  Target: ANGPTL4; (+) strand; PAM type: NRG; PAM sequence: CAG
ctcccactgtggcggcactt

SEQ ID NO: 12613 - DNA, 20 bp, Artificial Sequence
  Description of Artificial Sequence: Synthetic oligonucleotide
  Target: ANGPTL4; (+) strand; PAM type: NRG; PAM sequence: AGG
tcccactgtggcggcacttc

SEQ ID NO: 12614 - DNA, 20 bp, Artificial Sequence
  Description of Artificial Sequence: Synthetic oligonucleotide
  Target: ANGPTL4; (+) strand; PAM type: NRG; PAM sequence: GAG
ccactgtggcggcacttcag

SEQ ID NO: 12615 - DNA, 20 bp, Artificial Sequence
  Description of Artificial Sequence: Synthetic oligonucleotide
  Target: ANGPTL4; (+) strand; PAM type: NRG; PAM sequence: CAG
gcggcacttcaggagccctt

SEQ ID NO: 12616 - DNA, 20 bp, Artificial Sequence
  Description of Artificial Sequence: Synthetic oligonucleotide
  Target: ANGPTL4; (+) strand; PAM type: NRG; PAM sequence: TGG
ttcagcccaccgctgcactg

SEQ ID NO: 12617 - DNA, 20 bp, Artificial Sequence
  Description of Artificial Sequence: Synthetic oligonucleotide
  Target: ANGPTL4; (+) strand; PAM type: NRG; PAM sequence: GGG
tcagcccaccgctgcactgt

SEQ ID NO: 12618 - DNA, 20 bp, Artificial Sequence
  Description of Artificial Sequence: Synthetic oligonucleotide
  Target: ANGPTL4; (+) strand; PAM type: NRG; PAM sequence: GAG
agcccaccgctgcactgtgg

SEQ ID NO: 12619 - DNA, 20 bp, Artificial Sequence
  Description of Artificial Sequence: Synthetic oligonucleotide
  Target: ANGPTL4; (+) strand; PAM type: NRG; PAM sequence: TGG
gcactgtgggagcccctttc

SEQ ID NO: 12620 - DNA, 20 bp, Artificial Sequence
  Description of Artificial Sequence: Synthetic oligonucleotide
  Target: ANGPTL4; (+) strand; PAM type: NRG; PAM sequence: GGG
cactgtgggagcccctttct

SEQ ID NO: 12621 - DNA, 20 bp, Artificial Sequence
  Description of Artificial Sequence: Synthetic oligonucleotide
  Target: ANGPTL4; (+) strand; PAM type: NRG; PAM sequence: TGG
gtgggagcccctttctgggc

SEQ ID NO: 12622 - DNA, 20 bp, Artificial Sequence
  Description of Artificial Sequence: Synthetic oligonucleotide
  Target: ANGPTL4; (+) strand; PAM type: NRG; PAM sequence: AAG
agcccctttctgggctggcc

SEQ ID NO: 12623 - DNA, 20 bp, Artificial Sequence
  Description of Artificial Sequence: Synthetic oligonucleotide
  Target: ANGPTL4; (+) strand; PAM type: NRG; PAM sequence: AGG
gcccctttctgggctggcca

SEQ ID NO: 12624 - DNA, 20 bp, Artificial Sequence
  Description of Artificial Sequence: Synthetic oligonucleotide
  Target: ANGPTL4; (+) strand; PAM type: NRG; PAM sequence: CGG
ctttctgggctggccaaggc

SEQ ID NO: 12625 - DNA, 20 bp, Artificial Sequence
  Description of Artificial Sequence: Synthetic oligonucleotide
  Target: ANGPTL4; (+) strand; PAM type: NRG; PAM sequence: GAG
ttctgggctggccaaggccg

SEQ ID NO: 12626 - DNA, 20 bp, Artificial Sequence
  Description of Artificial Sequence: Synthetic oligonucleotide
  Target: ANGPTL4; (+) strand; PAM type: NRG; PAM sequence: TGG
gggctggccaaggccggagc

SEQ ID NO: 12627 - DNA, 20 bp, Artificial Sequence
  Description of Artificial Sequence: Synthetic oligonucleotide
  Target: ANGPTL4; (+) strand; PAM type: NRG; PAM sequence: CAG
aaggccggagctggctccct

SEQ ID NO: 12628 - DNA, 20 bp, Artificial Sequence
  Description of Artificial Sequence: Synthetic oligonucleotide
  Target: ANGPTL4; (+) strand; PAM type: NRG; PAM sequence: CAG
gagctggctccctcagcttg

SEQ ID NO: 12629 - DNA, 20 bp, Artificial Sequence
  Description of Artificial Sequence: Synthetic oligonucleotide
  Target: ANGPTL4; (+) strand; PAM type: NRG; PAM sequence: AGG
agctggctccctcagcttgc

SEQ ID NO: 12630 - DNA, 20 bp, Artificial Sequence
  Description of Artificial Sequence: Synthetic oligonucleotide
  Target: ANGPTL4; (+) strand; PAM type: NRG; PAM sequence: GGG
gctggctccctcagcttgca

SEQ ID NO: 12631 - DNA, 20 bp, Artificial Sequence
  Description of Artificial Sequence: Synthetic oligonucleotide
  Target: ANGPTL4; (+) strand; PAM type: NRG; PAM sequence: AAG
ggctccctcagcttgcaggg

SEQ ID NO: 12632 - DNA, 20 bp, Artificial Sequence
  Description of Artificial Sequence: Synthetic oligonucleotide
  Target: ANGPTL4; (+) strand; PAM type: NRG; PAM sequence: TGG
cctcagcttgcagggaagtg

SEQ ID NO: 12633 - DNA, 20 bp, Artificial Sequence
  Description of Artificial Sequence: Synthetic oligonucleotide
  Target: ANGPTL4; (+) strand; PAM type: NRG; PAM sequence: GAG
tcagcttgcagggaagtgtg

SEQ ID NO: 12634 - DNA, 20 bp, Artificial Sequence
  Description of Artificial Sequence: Synthetic oligonucleotide
  Target: ANGPTL4; (+) strand; PAM type: NRG; PAM sequence: AGG
cagcttgcagggaagtgtgg

SEQ ID NO: 12635 - DNA, 20 bp, Artificial Sequence
  Description of Artificial Sequence: Synthetic oligonucleotide
  Target: ANGPTL4; (+) strand; PAM type: NRG; PAM sequence: GGG
agcttgcagggaagtgtgga

SEQ ID NO: 12636 - DNA, 20 bp, Artificial Sequence
  Description of Artificial Sequence: Synthetic oligonucleotide
  Target: ANGPTL4; (+) strand; PAM type: NRG; PAM sequence: GAG
cttgcagggaagtgtggagg

SEQ ID NO: 12637 - DNA, 20 bp, Artificial Sequence
  Description of Artificial Sequence: Synthetic oligonucleotide
  Target: ANGPTL4; (+) strand; PAM type: NRG; PAM sequence: GAG
tgcagggaagtgtggaggga

SEQ ID NO: 12638 - DNA, 20 bp, Artificial Sequence
  Description of Artificial Sequence: Synthetic oligonucleotide
  Target: ANGPTL4; (+) strand; PAM type: NRG; PAM sequence: AGG
gcagggaagtgtggagggag

SEQ ID NO: 12639 - DNA, 20 bp, Artificial Sequence
  Description of Artificial Sequence: Synthetic oligonucleotide
  Target: ANGPTL4; (+) strand; PAM type: NRG; PAM sequence: GAG
aagtgtggagggagaggcgc

SEQ ID NO: 12640 - DNA, 20 bp, Artificial Sequence
  Description of Artificial Sequence: Synthetic oligonucleotide
  Target: ANGPTL4; (+) strand; PAM type: NRG; PAM sequence: CGG
gtggagggagaggcgcgagc

SEQ ID NO: 12641 - DNA, 20 bp, Artificial Sequence
  Description of Artificial Sequence: Synthetic oligonucleotide
  Target: ANGPTL4; (+) strand; PAM type: NRG; PAM sequence: CGG
ggagaggcgcgagccggaat

SEQ ID NO: 12642 - DNA, 20 bp, Artificial Sequence
  Description of Artificial Sequence: Synthetic oligonucleotide
  Target: ANGPTL4; (+) strand; PAM type: NRG; PAM sequence: GGG
gagaggcgcgagccggaatc

SEQ ID NO: 12643 - DNA, 20 bp, Artificial Sequence
  Description of Artificial Sequence: Synthetic oligonucleotide
  Target: ANGPTL4; (+) strand; PAM type: NRG; PAM sequence: GGG
agaggcgcgagccggaatcg

SEQ ID NO: 12644 - DNA, 20 bp, Artificial Sequence
  Description of Artificial Sequence: Synthetic oligonucleotide
  Target: ANGPTL4; (+) strand; PAM type: NRG; PAM sequence: CGG
gccggaatcggggctgcgcg

SEQ ID NO: 12645 - DNA, 20 bp, Artificial Sequence
  Description of Artificial Sequence: Synthetic oligonucleotide
  Target: ANGPTL4; (+) strand; PAM type: NRG; PAM sequence: TGG
ggggctgcgcgcggtgcttg

SEQ ID NO: 12646 - DNA, 20 bp, Artificial Sequence
  Description of Artificial Sequence: Synthetic oligonucleotide
  Target: ANGPTL4; (+) strand; PAM type: NRG; PAM sequence: GGG
gggctgcgcgcggtgcttgt

SEQ ID NO: 12647 - DNA, 20 bp, Artificial Sequence
  Description of Artificial Sequence: Synthetic oligonucleotide
  Target: ANGPTL4; (+) strand; PAM type: NRG; PAM sequence: CAG
tgcgcgcggtgcttgtgggc

SEQ ID NO: 12648 - DNA, 20 bp, Artificial Sequence
  Description of Artificial Sequence: Synthetic oligonucleotide
  Target: ANGPTL4; (+) strand; PAM type: NRG; PAM sequence: TGG
cgcggtgcttgtgggccagc

SEQ ID NO: 12649 - DNA, 20 bp, Artificial Sequence
  Description of Artificial Sequence: Synthetic oligonucleotide
  Target: ANGPTL4; (+) strand; PAM type: NRG; PAM sequence: GAG
cggtgcttgtgggccagctg

SEQ ID NO: 12650 - DNA, 20 bp, Artificial Sequence
  Description of Artificial Sequence: Synthetic oligonucleotide
  Target: ANGPTL4; (+) strand; PAM type: NRG; PAM sequence: CGG
ttgtgggccagctggagttc

SEQ ID NO: 12651 - DNA, 20 bp, Artificial Sequence
  Description of Artificial Sequence: Synthetic oligonucleotide
  Target: ANGPTL4; (+) strand; PAM type: NRG; PAM sequence: GGG
tgtgggccagctggagttcc

SEQ ID NO: 12652 - DNA, 20 bp, Artificial Sequence
  Description of Artificial Sequence: Synthetic oligonucleotide
  Target: ANGPTL4; (+) strand; PAM type: NRG; PAM sequence: TGG
gggccagctggagttccggg

SEQ ID NO: 12653 - DNA, 20 bp, Artificial Sequence
  Description of Artificial Sequence: Synthetic oligonucleotide
  Target: ANGPTL4; (+) strand; PAM type: NRG; PAM sequence: GGG
ggccagctggagttccgggt

SEQ ID NO: 12654 - DNA, 20 bp, Artificial Sequence
  Description of Artificial Sequence: Synthetic oligonucleotide
  Target: ANGPTL4; (+) strand; PAM type: NRG; PAM sequence: TGG
gctggagttccgggtgggcg

SEQ ID NO: 12655 - DNA, 20 bp, Artificial Sequence
  Description of Artificial Sequence: Synthetic oligonucleotide
  Target: ANGPTL4; (+) strand; PAM type: NRG; PAM sequence: GGG
ctggagttccgggtgggcgt

SEQ ID NO: 12656 - DNA, 20 bp, Artificial Sequence
  Description of Artificial Sequence: Synthetic oligonucleotide
  Target: ANGPTL4; (+) strand; PAM type: NRG; PAM sequence: TGG
gttccgggtgggcgtgggct

SEQ ID NO: 12657 - DNA, 20 bp, Artificial Sequence
  Description of Artificial Sequence: Synthetic oligonucleotide
  Target: ANGPTL4; (+) strand; PAM type: NRG; PAM sequence: CGG
ccgggtgggcgtgggcttgg

SEQ ID NO: 12658 - DNA, 20 bp, Artificial Sequence
  Description of Artificial Sequence: Synthetic oligonucleotide
  Target: ANGPTL4; (+) strand; PAM type: NRG; PAM sequence: CAG
ggcttggcggaccctgcact

SEQ ID NO: 12659 - DNA, 20 bp, Artificial Sequence
  Description of Artificial Sequence: Synthetic oligonucleotide
  Target: ANGPTL4; (+) strand; PAM type: NRG; PAM sequence: GAG
cttggcggaccctgcactca

SEQ ID NO: 12660 - DNA, 20 bp, Artificial Sequence
  Description of Artificial Sequence: Synthetic oligonucleotide
  Target: ANGPTL4; (+) strand; PAM type: NRG; PAM sequence: CAG
ggcggaccctgcactcagag

SEQ ID NO: 12661 - DNA, 20 bp, Artificial Sequence
  Description of Artificial Sequence: Synthetic oligonucleotide
  Target: ANGPTL4; (+) strand; PAM type: NRG; PAM sequence: CGG
ctgcactcagagcagccgtc

SEQ ID NO: 12662 - DNA, 20 bp, Artificial Sequence
  Description of Artificial Sequence: Synthetic oligonucleotide
  Target: ANGPTL4; (+) strand; PAM type: NRG; PAM sequence: TGG
gagcagccgtccggccctgc

SEQ ID NO: 12663 - DNA, 20 bp, Artificial Sequence
  Description of Artificial Sequence: Synthetic oligonucleotide
  Target: ANGPTL4; (+) strand; PAM type: NRG; PAM sequence: CGG
ccgtccggccctgctggccc

SEQ ID NO: 12664 - DNA, 20 bp, Artificial Sequence
  Description of Artificial Sequence: Synthetic oligonucleotide
  Target: ANGPTL4; (+) strand; PAM type: NRG; PAM sequence: GGG
cgtccggccctgctggcccc

SEQ ID NO: 12665 - DNA, 20 bp, Artificial Sequence
  Description of Artificial Sequence: Synthetic oligonucleotide
  Target: ANGPTL4; (+) strand; PAM type: NRG; PAM sequence: GAG
ccctgctggccccgggcaat

SEQ ID NO: 12666 - DNA, 20 bp, Artificial Sequence
  Description of Artificial Sequence: Synthetic oligonucleotide
  Target: ANGPTL4; (+) strand; PAM type: NRG; PAM sequence: AGG
cctgctggccccgggcaatg

SEQ ID NO: 12667 - DNA, 20 bp, Artificial Sequence
  Description of Artificial Sequence: Synthetic oligonucleotide
  Target: ANGPTL4; (+) strand; PAM type: NRG; PAM sequence: GGG
ctgctggccccgggcaatga

SEQ ID NO: 12668 - DNA, 20 bp, Artificial Sequence
  Description of Artificial Sequence: Synthetic oligonucleotide
  Target: ANGPTL4; (+) strand; PAM type: NRG; PAM sequence: GGG
tgctggccccgggcaatgag

SEQ ID NO: 12669 - DNA, 20 bp, Artificial Sequence
  Description of Artificial Sequence: Synthetic oligonucleotide
  Target: ANGPTL4; (+) strand; PAM type: NRG; PAM sequence: TAG
gccccgggcaatgaggggct

SEQ ID NO: 12670 - DNA, 20 bp, Artificial Sequence
  Description of Artificial Sequence: Synthetic oligonucleotide
  Target: ANGPTL4; (+) strand; PAM type: NRG; PAM sequence: CGG
gcaatgaggggcttagcacc

SEQ ID NO: 12671 - DNA, 20 bp, Artificial Sequence
  Description of Artificial Sequence: Synthetic oligonucleotide
  Target: ANGPTL4; (+) strand; PAM type: NRG; PAM sequence: GGG
caatgaggggcttagcaccc

SEQ ID NO: 12672 - DNA, 20 bp, Artificial Sequence
  Description of Artificial Sequence: Synthetic oligonucleotide
  Target: ANGPTL4; (+) strand; PAM type: NRG; PAM sequence: CGG
gaggggcttagcacccgggc

SEQ ID NO: 12673 - DNA, 20 bp, Artificial Sequence
  Description of Artificial Sequence: Synthetic oligonucleotide
  Target: ANGPTL4; (+) strand; PAM type: NRG; PAM sequence: CAG
ggcttagcacccgggccgga

SEQ ID NO: 12674 - DNA, 20 bp, Artificial Sequence
  Description of Artificial Sequence: Synthetic oligonucleotide
  Target: ANGPTL4; (+) strand; PAM type: NRG; PAM sequence: CGG
ttagcacccgggccggacag

SEQ ID NO: 12675 - DNA, 20 bp, Artificial Sequence
  Description of Artificial Sequence: Synthetic oligonucleotide
  Target: ANGPTL4; (+) strand; PAM type: NRG; PAM sequence: CGG
cccgggccggacagcggctg

SEQ ID NO: 12676 - DNA, 20 bp, Artificial Sequence
  Description of Artificial Sequence: Synthetic oligonucleotide
  Target: ANGPTL4; (+) strand; PAM type: NRG; PAM sequence: GAG
cgggccggacagcggctgcg

SEQ ID NO: 12677 - DNA, 20 bp, Artificial Sequence
  Description of Artificial Sequence: Synthetic oligonucleotide
  Target: ANGPTL4; (+) strand; PAM type: NRG; PAM sequence: AGG
gggccggacagcggctgcgg

SEQ ID NO: 12678 - DNA, 20 bp, Artificial Sequence
  Description of Artificial Sequence: Synthetic oligonucleotide
  Target: ANGPTL4; (+) strand; PAM type: NRG; PAM sequence: GGG
ggccggacagcggctgcgga

SEQ ID NO: 12679 - DNA, 20 bp, Artificial Sequence
  Description of Artificial Sequence: Synthetic oligonucleotide
  Target: ANGPTL4; (+) strand; PAM type: NRG; PAM sequence: TGG
agcggctgcggagggtgtac

SEQ ID NO: 12680 - DNA, 20 bp, Artificial Sequence
  Description of Artificial Sequence: Synthetic oligonucleotide
  Target: ANGPTL4; (+) strand; PAM type: NRG; PAM sequence: GGG
gcggctgcggagggtgtact

SEQ ID NO: 12681 - DNA, 20 bp, Artificial Sequence
  Description of Artificial Sequence: Synthetic oligonucleotide
  Target: ANGPTL4; (+) strand; PAM type: NRG; PAM sequence: CAG
ggagggtgtactgggtcccc

SEQ ID NO: 12682 - DNA, 20 bp, Artificial Sequence
  Description of Artificial Sequence: Synthetic oligonucleotide
  Target: ANGPTL4; (+) strand; PAM type: NRG; PAM sequence: CAG
gggtgtactgggtcccccag

SEQ ID NO: 12683 - DNA, 20 bp, Artificial Sequence
  Description of Artificial Sequence: Synthetic oligonucleotide
  Target: ANGPTL4; (+) strand; PAM type: NRG; PAM sequence: CAG
actgggtcccccagcagtgc

SEQ ID NO: 12684 - DNA, 20 bp, Artificial Sequence
  Description of Artificial Sequence: Synthetic oligonucleotide
  Target: ANGPTL4; (+) strand; PAM type: NRG; PAM sequence: CGG
ccccagcagtgccagcgcac

SEQ ID NO: 12685 - DNA, 20 bp, Artificial Sequence
  Description of Artificial Sequence: Synthetic oligonucleotide
  Target: ANGPTL4; (+) strand; PAM type: NRG; PAM sequence: CAG
cgctgcgcttgatttctcac

SEQ ID NO: 12686 - DNA, 20 bp, Artificial Sequence
  Description of Artificial Sequence: Synthetic oligonucleotide
  Target: ANGPTL4; (+) strand; PAM type: NRG; PAM sequence: AGG
gctgcgcttgatttctcacc

SEQ ID NO: 12687 - DNA, 20 bp, Artificial Sequence
  Description of Artificial Sequence: Synthetic oligonucleotide
  Target: ANGPTL4; (+) strand; PAM type: NRG; PAM sequence: TAG
cttgatttctcaccaggcct

SEQ ID NO: 12688 - DNA, 20 bp, Artificial Sequence
  Description of Artificial Sequence: Synthetic oligonucleotide
  Target: ANGPTL4; (+) strand; PAM type: NRG; PAM sequence: CGG
aggccttagctgccttcccg

SEQ ID NO: 12689 - DNA, 20 bp, Artificial Sequence
  Description of Artificial Sequence: Synthetic oligonucleotide
  Target: ANGPTL4; (+) strand; PAM type: NRG; PAM sequence: GGG
ggccttagctgccttcccgc

SEQ ID NO: 12690 - DNA, 20 bp, Artificial Sequence
  Description of Artificial Sequence: Synthetic oligonucleotide
  Target: ANGPTL4; (+) strand; PAM type: NRG; PAM sequence: GGG
gccttagctgccttcccgcg

SEQ ID NO: 12691 - DNA, 20 bp, Artificial Sequence
  Description of Artificial Sequence: Synthetic oligonucleotide
  Target: ANGPTL4; (+) strand; PAM type: NRG; PAM sequence: CAG
ttagctgccttcccgcgggg

SEQ ID NO: 12692 - DNA, 20 bp, Artificial Sequence
  Description of Artificial Sequence: Synthetic oligonucleotide
  Target: ANGPTL4; (+) strand; PAM type: NRG; PAM sequence: AGG
tagctgccttcccgcggggc

SEQ ID NO: 12693 - DNA, 20 bp, Artificial Sequence
  Description of Artificial Sequence: Synthetic oligonucleotide
  Target: ANGPTL4; (+) strand; PAM type: NRG; PAM sequence: GGG
agctgccttcccgcggggca

SEQ ID NO: 12694 - DNA, 20 bp, Artificial Sequence
  Description of Artificial Sequence: Synthetic oligonucleotide
  Target: ANGPTL4; (+) strand; PAM type: NRG; PAM sequence: CGG
ccttcccgcggggcagggat

SEQ ID NO: 12695 - DNA, 20 bp, Artificial Sequence
  Description of Artificial Sequence: Synthetic oligonucleotide
  Target: ANGPTL4; (+) strand; PAM type: NRG; PAM sequence: GGG
cttcccgcggggcagggatc

SEQ ID NO: 12696 - DNA, 20 bp, Artificial Sequence
  Description of Artificial Sequence: Synthetic oligonucleotide
  Target: ANGPTL4; (+) strand; PAM type: NRG; PAM sequence: CAG
ggggcagggatcgggacctg

SEQ ID NO: 12697 - DNA, 20 bp, Artificial Sequence
  Description of Artificial Sequence: Synthetic oligonucleotide
  Target: ANGPTL4; (+) strand; PAM type: NRG; PAM sequence: GAG
acctgcagcccgccatgcct

SEQ ID NO: 12698 - DNA, 20 bp, Artificial Sequence
  Description of Artificial Sequence: Synthetic oligonucleotide
  Target: ANGPTL4; (+) strand; PAM type: NRG; PAM sequence: TGG
tgagcctcccaccccctcca

SEQ ID NO: 12699 - DNA, 20 bp, Artificial Sequence
  Description of Artificial Sequence: Synthetic oligonucleotide
  Target: ANGPTL4; (+) strand; PAM type: NRG; PAM sequence: GGG
gagcctcccaccccctccat

SEQ ID NO: 12700 - DNA, 20 bp, Artificial Sequence
  Description of Artificial Sequence: Synthetic oligonucleotide
  Target: ANGPTL4; (+) strand; PAM type: NRG; PAM sequence: CGG
cccctccatgggctcctgtg

SEQ ID NO: 12701 - DNA, 20 bp, Artificial Sequence
  Description of Artificial Sequence: Synthetic oligonucleotide
  Target: ANGPTL4; (+) strand; PAM type: NRG; PAM sequence: GAG
gcggcccgcgcctccctgac

SEQ ID NO: 12702 - DNA, 20 bp, Artificial Sequence
  Description of Artificial Sequence: Synthetic oligonucleotide
  Target: ANGPTL4; (+) strand; PAM type: NRG; PAM sequence: TGG
gagcactgccccatgctcca

SEQ ID NO: 12703 - DNA, 20 bp, Artificial Sequence
  Description of Artificial Sequence: Synthetic oligonucleotide
  Target: ANGPTL4; (+) strand; PAM type: NRG; PAM sequence: CAG
gccccatgctccatggtgcc

SEQ ID NO: 12704 - DNA, 20 bp, Artificial Sequence
  Description of Artificial Sequence: Synthetic oligonucleotide
  Target: ANGPTL4; (+) strand; PAM type: NRG; PAM sequence: AAG
cccagtcccatccaccaccc

SEQ ID NO: 12705 - DNA, 20 bp, Artificial Sequence
  Description of Artificial Sequence: Synthetic oligonucleotide
  Target: ANGPTL4; (+) strand; PAM type: NRG; PAM sequence: AGG
ccagtcccatccaccaccca

SEQ ID NO: 12706 - DNA, 20 bp, Artificial Sequence
  Description of Artificial Sequence: Synthetic oligonucleotide
  Target: ANGPTL4; (+) strand; PAM type: NRG; PAM sequence: GGG
cagtcccatccaccacccaa

SEQ ID NO: 12707 - DNA, 20 bp, Artificial Sequence
  Description of Artificial Sequence: Synthetic oligonucleotide
  Target: ANGPTL4; (+) strand; PAM type: NRG; PAM sequence: GAG
ccatccaccacccaagggct

SEQ ID NO: 12708 - DNA, 20 bp, Artificial Sequence
  Description of Artificial Sequence: Synthetic oligonucleotide
  Target: ANGPTL4; (+) strand; PAM type: NRG; PAM sequence: AGG
catccaccacccaagggctg

SEQ ID NO: 12709 - DNA, 20 bp, Artificial Sequence
  Description of Artificial Sequence: Synthetic oligonucleotide
  Target: ANGPTL4; (+) strand; PAM type: NRG; PAM sequence: GAG
tccaccacccaagggctgag

SEQ ID NO: 12710 - DNA, 20 bp, Artificial Sequence
  Description of Artificial Sequence: Synthetic oligonucleotide
  Target: ANGPTL4; (+) strand; PAM type: NRG; PAM sequence: CAG
cacccaagggctgaggagtg

SEQ ID NO: 12711 - DNA, 20 bp, Artificial Sequence
  Description of Artificial Sequence: Synthetic oligonucleotide
  Target: ANGPTL4; (+) strand; PAM type: NRG; PAM sequence: AGG
acccaagggctgaggagtgc

SEQ ID NO: 12712 - DNA, 20 bp, Artificial Sequence
  Description of Artificial Sequence: Synthetic oligonucleotide
  Target: ANGPTL4; (+) strand; PAM type: NRG; PAM sequence: CGG
ggctgaggagtgcaggcgca

SEQ ID NO: 12713 - DNA, 20 bp, Artificial Sequence
  Description of Artificial Sequence: Synthetic oligonucleotide
  Target: ANGPTL4; (+) strand; PAM type: NRG; PAM sequence: TGG
aggagtgcaggcgcacggcg

SEQ ID NO: 12714 - DNA, 20 bp, Artificial Sequence
  Description of Artificial Sequence: Synthetic oligonucleotide
  Target: ANGPTL4; (+) strand; PAM type: NRG; PAM sequence: GGG
ggagtgcaggcgcacggcgt

SEQ ID NO: 12715 - DNA, 20 bp, Artificial Sequence
  Description of Artificial Sequence: Synthetic oligonucleotide
  Target: ANGPTL4; (+) strand; PAM type: NRG; PAM sequence: TGG
gcaggcgcacggcgtgggac

SEQ ID NO: 12716 - DNA, 20 bp, Artificial Sequence
  Description of Artificial Sequence: Synthetic oligonucleotide
  Target: ANGPTL4; (+) strand; PAM type: NRG; PAM sequence: CAG
ggcgcacggcgtgggactgg

SEQ ID NO: 12717 - DNA, 20 bp, Artificial Sequence
  Description of Artificial Sequence: Synthetic oligonucleotide
  Target: ANGPTL4; (+) strand; PAM type: NRG; PAM sequence: AGG
gcgcacggcgtgggactggc

SEQ ID NO: 12718 - DNA, 20 bp, Artificial Sequence
  Description of Artificial Sequence: Synthetic oligonucleotide
  Target: ANGPTL4; (+) strand; PAM type: NRG; PAM sequence: CAG
cacggcgtgggactggcagg

SEQ ID NO: 12719 - DNA, 20 bp, Artificial Sequence
  Description of Artificial Sequence: Synthetic oligonucleotide
  Target: ANGPTL4; (+) strand; PAM type: NRG; PAM sequence: CAG
ctggcaggcagctccacctg

SEQ ID NO: 12720 - DNA, 20 bp, Artificial Sequence
  Description of Artificial Sequence: Synthetic oligonucleotide
  Target: ANGPTL4; (+) strand; PAM type: NRG; PAM sequence: CGG
ggcagctccacctgcagccc

SEQ ID NO: 12721 - DNA, 20 bp, Artificial Sequence
  Description of Artificial Sequence: Synthetic oligonucleotide
  Target: ANGPTL4; (+) strand; PAM type: NRG; PAM sequence: CAG
ctccacctgcagccccggtg

SEQ ID NO: 12722 - DNA, 20 bp, Artificial Sequence
  Description of Artificial Sequence: Synthetic oligonucleotide
  Target: ANGPTL4; (+) strand; PAM type: NRG; PAM sequence: AGG
tccacctgcagccccggtgc

SEQ ID NO: 12723 - DNA, 20 bp, Artificial Sequence
  Description of Artificial Sequence: Synthetic oligonucleotide
  Target: ANGPTL4; (+) strand; PAM type: NRG; PAM sequence: TGG
agccccggtgcaggatccac

SEQ ID NO: 12724 - DNA, 20 bp, Artificial Sequence
  Description of Artificial Sequence: Synthetic oligonucleotide
  Target: ANGPTL4; (+) strand; PAM type: NRG; PAM sequence: GGG
gccccggtgcaggatccact

SEQ ID NO: 12725 - DNA, 20 bp, Artificial Sequence
  Description of Artificial Sequence: Synthetic oligonucleotide
  Target: ANGPTL4; (+) strand; PAM type: NRG; PAM sequence: AAG
ggtgcaggatccactgggtg

SEQ ID NO: 12726 - DNA, 20 bp, Artificial Sequence
  Description of Artificial Sequence: Synthetic oligonucleotide
  Target: ANGPTL4; (+) strand; PAM type: NRG; PAM sequence: TAG
caggatccactgggtgaagc

SEQ ID NO: 12727 - DNA, 20 bp, Artificial Sequence
  Description of Artificial Sequence: Synthetic oligonucleotide
  Target: ANGPTL4; (+) strand; PAM type: NRG; PAM sequence: TGG
atccactgggtgaagctagc

SEQ ID NO: 12728 - DNA, 20 bp, Artificial Sequence
  Description of Artificial Sequence: Synthetic oligonucleotide
  Target: ANGPTL4; (+) strand; PAM type: NRG; PAM sequence: GGG
tccactgggtgaagctagct

SEQ ID NO: 12729 - DNA, 20 bp, Artificial Sequence
  Description of Artificial Sequence: Synthetic oligonucleotide
  Target: ANGPTL4; (+) strand; PAM type: NRG; PAM sequence: GAG
gtgaagctagctgggctcct

SEQ ID NO: 12730 - DNA, 20 bp, Artificial Sequence
  Description of Artificial Sequence: Synthetic oligonucleotide
  Target: ANGPTL4; (+) strand; PAM type: NRG; PAM sequence: TGG
gctagctgggctcctgagtc

SEQ ID NO: 12731 - DNA, 20 bp, Artificial Sequence
  Description of Artificial Sequence: Synthetic oligonucleotide
  Target: ANGPTL4; (+) strand; PAM type: NRG; PAM sequence: TGG
agctgggctcctgagtctgg

SEQ ID NO: 12732 - DNA, 20 bp, Artificial Sequence
  Description of Artificial Sequence: Synthetic oligonucleotide
  Target: ANGPTL4; (+) strand; PAM type: NRG; PAM sequence: GGG
gctgggctcctgagtctggt

SEQ ID NO: 12733 - DNA, 20 bp, Artificial Sequence
  Description of Artificial Sequence: Synthetic oligonucleotide
  Target: ANGPTL4; (+) strand; PAM type: NRG; PAM sequence: GGG
ctgggctcctgagtctggtg

SEQ ID NO: 12734 - DNA, 20 bp, Artificial Sequence
  Description of Artificial Sequence: Synthetic oligonucleotide
  Target: ANGPTL4; (+) strand; PAM type: NRG; PAM sequence: TGG
tcctgagtctggtggggacg

SEQ ID NO: 12735 - DNA, 20 bp, Artificial Sequence
  Description of Artificial Sequence: Synthetic oligonucleotide
  Target: ANGPTL4; (+) strand; PAM type: NRG; PAM sequence: GAG
ctgagtctggtggggacgtg

SEQ ID NO: 12736 - DNA, 20 bp, Artificial Sequence
  Description of Artificial Sequence: Synthetic oligonucleotide
  Target: ANGPTL4; (+) strand; PAM type: NRG; PAM sequence: TAG
ggacgtggagaacctttgtc

SEQ ID NO: 12737 - DNA, 20 bp, Artificial Sequence
  Description of Artificial Sequence: Synthetic oligonucleotide
  Target: ANGPTL4; (+) strand; PAM type: NRG; PAM sequence: CAG
tggagaacctttgtctagct

SEQ ID NO: 12738 - DNA, 20 bp, Artificial Sequence
  Description of Artificial Sequence: Synthetic oligonucleotide
  Target: ANGPTL4; (+) strand; PAM type: NRG; PAM sequence: AGG
ggagaacctttgtctagctc

SEQ ID NO: 12739 - DNA, 20 bp, Artificial Sequence
  Description of Artificial Sequence: Synthetic oligonucleotide
  Target: ANGPTL4; (+) strand; PAM type: NRG; PAM sequence: GGG
gagaacctttgtctagctca

SEQ ID NO: 12740 - DNA, 20 bp, Artificial Sequence
  Description of Artificial Sequence: Synthetic oligonucleotide
  Target: ANGPTL4; (+) strand; PAM type: NRG; PAM sequence: TAG
accaatcatcaccctatgtc

SEQ ID NO: 12741 - DNA, 20 bp, Artificial Sequence
  Description of Artificial Sequence: Synthetic oligonucleotide
  Target: ANGPTL4; (+) strand; PAM type: NRG; PAM sequence: CAG
tcatcaccctatgtctagct

SEQ ID NO: 12742 - DNA, 20 bp, Artificial Sequence
  Description of Artificial Sequence: Synthetic oligonucleotide
  Target: ANGPTL4; (+) strand; PAM type: NRG; PAM sequence: AGG
catcaccctatgtctagctc

SEQ ID NO: 12743 - DNA, 20 bp, Artificial Sequence
  Description of Artificial Sequence: Synthetic oligonucleotide
  Target: ANGPTL4; (+) strand; PAM type: NRG; PAM sequence: GGG
atcaccctatgtctagctca

SEQ ID NO: 12744 - DNA, 20 bp, Artificial Sequence
  Description of Artificial Sequence: Synthetic oligonucleotide
  Target: ANGPTL4; (+) strand; PAM type: NRG; PAM sequence: TAG
accaatgaacactctgtatc

SEQ ID NO: 12745 - DNA, 20 bp, Artificial Sequence
  Description of Artificial Sequence: Synthetic oligonucleotide
  Target: ANGPTL4; (+) strand; PAM type: NRG; PAM sequence: TGG
cactctgtatctagctactc

SEQ ID NO: 12746 - DNA, 20 bp, Artificial Sequence
  Description of Artificial Sequence: Synthetic oligonucleotide
  Target: ANGPTL4; (+) strand; PAM type: NRG; PAM sequence: TGG
tctgtatctagctactctgg

SEQ ID NO: 12747 - DNA, 20 bp, Artificial Sequence
  Description of Artificial Sequence: Synthetic oligonucleotide
  Target: ANGPTL4; (+) strand; PAM type: NRG; PAM sequence: GGG
ctgtatctagctactctggt

SEQ ID NO: 12748 - DNA, 20 bp, Artificial Sequence
  Description of Artificial Sequence: Synthetic oligonucleotide
  Target: ANGPTL4; (+) strand; PAM type: NRG; PAM sequence: GGG
tgtatctagctactctggtg

SEQ ID NO: 12749 - DNA, 20 bp, Artificial Sequence
  Description of Artificial Sequence: Synthetic oligonucleotide
  Target: ANGPTL4; (+) strand; PAM type: NRG; PAM sequence: TGG
tagctactctggtggggcct

SEQ ID NO: 12750 - DNA, 20 bp, Artificial Sequence
  Description of Artificial Sequence: Synthetic oligonucleotide
  Target: ANGPTL4; (+) strand; PAM type: NRG; PAM sequence: GAG
gctactctggtggggccttg

SEQ ID NO: 12751 - DNA, 20 bp, Artificial Sequence
  Description of Artificial Sequence: Synthetic oligonucleotide
  Target: ANGPTL4; (+) strand; PAM type: NRG; PAM sequence: TAG
ccttggagaacctttatgtc

SEQ ID NO: 12752 - DNA, 20 bp, Artificial Sequence
  Description of Artificial Sequence: Synthetic oligonucleotide
  Target: ANGPTL4; (+) strand; PAM type: NRG; PAM sequence: CAG
gagaacctttatgtctagct

SEQ ID NO: 12753 - DNA, 20 bp, Artificial Sequence
  Description of Artificial Sequence: Synthetic oligonucleotide
  Target: ANGPTL4; (+) strand; PAM type: NRG; PAM sequence: AGG
agaacctttatgtctagctc

SEQ ID NO: 12754 - DNA, 20 bp, Artificial Sequence
  Description of Artificial Sequence: Synthetic oligonucleotide
  Target: ANGPTL4; (+) strand; PAM type: NRG; PAM sequence: GGG
gaacctttatgtctagctca

SEQ ID NO: 12755 - DNA, 20 bp, Artificial Sequence
  Description of Artificial Sequence: Synthetic oligonucleotide
  Target: ANGPTL4; (+) strand; PAM type: NRG; PAM sequence: CGG
gggattgtaaatacaccaat

SEQ ID NO: 12756 - DNA, 20 bp, Artificial Sequence
  Description of Artificial Sequence: Synthetic oligonucleotide
  Target: ANGPTL4; (+) strand; PAM type: NRG; PAM sequence: TAG
accaatcggcactctgtatc

SEQ ID NO: 12757 - DNA, 20 bp, Artificial Sequence
  Description of Artificial Sequence: Synthetic oligonucleotide
  Target: ANGPTL4; (+) strand; PAM type: NRG; PAM sequence: AAG
cggcactctgtatctagctc

SEQ ID NO: 12758 - DNA, 20 bp, Artificial Sequence
  Description of Artificial Sequence: Synthetic oligonucleotide
  Target: ANGPTL4; (+) strand; PAM type: NRG; PAM sequence: AGG
ggcactctgtatctagctca

SEQ ID NO: 12759 - DNA, 20 bp, Artificial Sequence
  Description of Artificial Sequence: Synthetic oligonucleotide
  Target: ANGPTL4; (+) strand; PAM type: NRG; PAM sequence: CAG
aggtttgtaaacacaccaat

SEQ ID NO: 12760 - DNA, 20 bp, Artificial Sequence
  Description of Artificial Sequence: Synthetic oligonucleotide
  Target: ANGPTL4; (+) strand; PAM type: NRG; PAM sequence: TAG
accaatcagcaccctgtgtc

SEQ ID NO: 12761 - DNA, 20 bp, Artificial Sequence
  Description of Artificial Sequence: Synthetic oligonucleotide
  Target: ANGPTL4; (+) strand; PAM type: NRG; PAM sequence: CAG
tcagcaccctgtgtctagct

SEQ ID NO: 12762 - DNA, 20 bp, Artificial Sequence
  Description of Artificial Sequence: Synthetic oligonucleotide
  Target: ANGPTL4; (+) strand; PAM type: NRG; PAM sequence: AGG
cagcaccctgtgtctagctc

SEQ ID NO: 12763 - DNA, 20 bp, Artificial Sequence
  Description of Artificial Sequence: Synthetic oligonucleotide
  Target: ANGPTL4; (+) strand; PAM type: NRG; PAM sequence: GGG
agcaccctgtgtctagctca

SEQ ID NO: 12764 - DNA, 20 bp, Artificial Sequence
  Description of Artificial Sequence: Synthetic oligonucleotide
  Target: ANGPTL4; (+) strand; PAM type: NRG; PAM sequence: TAG
accaatcgacactctgtatc

SEQ ID NO: 12765 - DNA, 20 bp, Artificial Sequence
  Description of Artificial Sequence: Synthetic oligonucleotide
  Target: ANGPTL4; (+) strand; PAM type: NRG; PAM sequence: TGG
cactctgtatctagctactg

SEQ ID NO: 12766 - DNA, 20 bp, Artificial Sequence
  Description of Artificial Sequence: Synthetic oligonucleotide
  Target: ANGPTL4; (+) strand; PAM type: NRG; PAM sequence: TGG
tctgtatctagctactgtgg

SEQ ID NO: 12767 - DNA, 20 bp, Artificial Sequence
  Description of Artificial Sequence: Synthetic oligonucleotide
  Target: ANGPTL4; (+) strand; PAM type: NRG; PAM sequence: GGG
ctgtatctagctactgtggt

SEQ ID NO: 12768 - DNA, 20 bp, Artificial Sequence
  Description of Artificial Sequence: Synthetic oligonucleotide
  Target: ANGPTL4; (+) strand; PAM type: NRG; PAM sequence: GGG
tgtatctagctactgtggtg

SEQ ID NO: 12769 - DNA, 20 bp, Artificial Sequence
  Description of Artificial Sequence: Synthetic oligonucleotide
  Target: ANGPTL4; (+) strand; PAM type: NRG; PAM sequence: TGG
tagctactgtggtggggcct

SEQ ID NO: 12770 - DNA, 20 bp, Artificial Sequence
  Description of Artificial Sequence: Synthetic oligonucleotide
  Target: ANGPTL4; (+) strand; PAM type: NRG; PAM sequence: GAG
gctactgtggtggggccttg

SEQ ID NO: 12771 - DNA, 20 bp, Artificial Sequence
  Description of Artificial Sequence: Synthetic oligonucleotide
  Target: ANGPTL4; (+) strand; PAM type: NRG; PAM sequence: TAG
ttgtgttgacactctgtatc

SEQ ID NO: 12772 - DNA, 20 bp, Artificial Sequence
  Description of Artificial Sequence: Synthetic oligonucleotide
  Target: ANGPTL4; (+) strand; PAM type: NRG; PAM sequence: TGG
cactctgtatctagttaatc

SEQ ID NO: 12773 - DNA, 20 bp, Artificial Sequence
  Description of Artificial Sequence: Synthetic oligonucleotide
  Target: ANGPTL4; (+) strand; PAM type: NRG; PAM sequence: TGG
tctgtatctagttaatctgg

SEQ ID NO: 12774 - DNA, 20 bp, Artificial Sequence
  Description of Artificial Sequence: Synthetic oligonucleotide
  Target: ANGPTL4; (+) strand; PAM type: NRG; PAM sequence: GGG
ctgtatctagttaatctggt

SEQ ID NO: 12775 - DNA, 20 bp, Artificial Sequence
  Description of Artificial Sequence: Synthetic oligonucleotide
  Target: ANGPTL4; (+) strand; PAM type: NRG; PAM sequence: GGG
tgtatctagttaatctggtg

SEQ ID NO: 12776 - DNA, 20 bp, Artificial Sequence
  Description of Artificial Sequence: Synthetic oligonucleotide
  Target: ANGPTL4; (+) strand; PAM type: NRG; PAM sequence: TGG
tagttaatctggtggggatg

SEQ ID NO: 12777 - DNA, 20 bp, Artificial Sequence
  Description of Artificial Sequence: Synthetic oligonucleotide
  Target: ANGPTL4; (+) strand; PAM type: NRG; PAM sequence: GAG
gttaatctggtggggatgtg

SEQ ID NO: 12778 - DNA, 20 bp, Artificial Sequence
  Description of Artificial Sequence: Synthetic oligonucleotide
  Target: ANGPTL4; (+) strand; PAM type: NRG; PAM sequence: TAG
atgtggagaacctttgtgtc

SEQ ID NO: 12779 - DNA, 20 bp, Artificial Sequence
  Description of Artificial Sequence: Synthetic oligonucleotide
  Target: ANGPTL4; (+) strand; PAM type: NRG; PAM sequence: CAG
gagaacctttgtgtctagct

SEQ ID NO: 12780 - DNA, 20 bp, Artificial Sequence
  Description of Artificial Sequence: Synthetic oligonucleotide
  Target: ANGPTL4; (+) strand; PAM type: NRG; PAM sequence: AGG
agaacctttgtgtctagctc

SEQ ID NO: 12781 - DNA, 20 bp, Artificial Sequence
  Description of Artificial Sequence: Synthetic oligonucleotide
  Target: ANGPTL4; (+) strand; PAM type: NRG; PAM sequence: CAG
ggaattgtaaacgcaccaat

SEQ ID NO: 12782 - DNA, 20 bp, Artificial Sequence
  Description of Artificial Sequence: Synthetic oligonucleotide
  Target: ANGPTL4; (+) strand; PAM type: NRG; PAM sequence: CAG
caatcagcgccctgtcaaaa

SEQ ID NO: 12783 - DNA, 20 bp, Artificial Sequence
  Description of Artificial Sequence: Synthetic oligonucleotide
  Target: ANGPTL4; (+) strand; PAM type: NRG; PAM sequence: CAG
agcgccctgtcaaaacagac

SEQ ID NO: 12784 - DNA, 20 bp, Artificial Sequence
  Description of Artificial Sequence: Synthetic oligonucleotide
  Target: ANGPTL4; (+) strand; PAM type: NRG; PAM sequence: TGG
gccctgtcaaaacagaccag

SEQ ID NO: 12785 - DNA, 20 bp, Artificial Sequence
  Description of Artificial Sequence: Synthetic oligonucleotide
  Target: ANGPTL4; (+) strand; PAM type: NRG; PAM sequence: GGG
ccctgtcaaaacagaccagt

SEQ ID NO: 12786 - DNA, 20 bp, Artificial Sequence
  Description of Artificial Sequence: Synthetic oligonucleotide
  Target: ANGPTL4; (+) strand; PAM type: NRG; PAM sequence: CAG
gaccagtgggctctaccaat

SEQ ID NO: 12787 - DNA, 20 bp, Artificial Sequence
  Description of Artificial Sequence: Synthetic oligonucleotide
  Target: ANGPTL4; (+) strand; PAM type: NRG; PAM sequence: CAG
cagtgggctctaccaatcag

SEQ ID NO: 12788 - DNA, 20 bp, Artificial Sequence
  Description of Artificial Sequence: Synthetic oligonucleotide
  Target: ANGPTL4; (+) strand; PAM type: NRG; PAM sequence: AGG
agtgggctctaccaatcagc

SEQ ID NO: 12789 - DNA, 20 bp, Artificial Sequence
  Description of Artificial Sequence: Synthetic oligonucleotide
  Target: ANGPTL4; (+) strand; PAM type: NRG; PAM sequence: TGG
ctctaccaatcagcaggatg

SEQ ID NO: 12790 - DNA, 20 bp, Artificial Sequence
  Description of Artificial Sequence: Synthetic oligonucleotide
  Target: ANGPTL4; (+) strand; PAM type: NRG; PAM sequence: GGG
tctaccaatcagcaggatgt

SEQ ID NO: 12791 - DNA, 20 bp, Artificial Sequence
  Description of Artificial Sequence: Synthetic oligonucleotide
  Target: ANGPTL4; (+) strand; PAM type: NRG; PAM sequence: TGG
accaatcagcaggatgtggg

SEQ ID NO: 12792 - DNA, 20 bp, Artificial Sequence
  Description of Artificial Sequence: Synthetic oligonucleotide
  Target: ANGPTL4; (+) strand; PAM type: NRG; PAM sequence: GGG
ccaatcagcaggatgtgggt

SEQ ID NO: 12793 - DNA, 20 bp, Artificial Sequence
  Description of Artificial Sequence: Synthetic oligonucleotide
  Target: ANGPTL4; (+) strand; PAM type: NRG; PAM sequence: GGG
caatcagcaggatgtgggtg

SEQ ID NO: 12794 - DNA, 20 bp, Artificial Sequence
  Description of Artificial Sequence: Synthetic oligonucleotide
  Target: ANGPTL4; (+) strand; PAM type: NRG; PAM sequence: CAG
cagcaggatgtgggtggggc

SEQ ID NO: 12795 - DNA, 20 bp, Artificial Sequence
  Description of Artificial Sequence: Synthetic oligonucleotide
  Target: ANGPTL4; (+) strand; PAM type: NRG; PAM sequence: AAG
ggatgtgggtggggccagat

SEQ ID NO: 12796 - DNA, 20 bp, Artificial Sequence
  Description of Artificial Sequence: Synthetic oligonucleotide
  Target: ANGPTL4; (+) strand; PAM type: NRG; PAM sequence: GAG
atgtgggtggggccagataa

SEQ ID NO: 12797 - DNA, 20 bp, Artificial Sequence
  Description of Artificial Sequence: Synthetic oligonucleotide
  Target: ANGPTL4; (+) strand; PAM type: NRG; PAM sequence: AAG
ggggccagataagagaataa

SEQ ID NO: 12798 - DNA, 20 bp, Artificial Sequence
  Description of Artificial Sequence: Synthetic oligonucleotide
  Target: ANGPTL4; (+) strand; PAM type: NRG; PAM sequence: CAG
gccagataagagaataaaag

SEQ ID NO: 12799 - DNA, 20 bp, Artificial Sequence
  Description of Artificial Sequence: Synthetic oligonucleotide
  Target: ANGPTL4; (+) strand; PAM type: NRG; PAM sequence: AGG
ccagataagagaataaaagc

SEQ ID NO: 12800 - DNA, 20 bp, Artificial Sequence
  Description of Artificial Sequence: Synthetic oligonucleotide
  Target: ANGPTL4; (+) strand; PAM type: NRG; PAM sequence: GAG
agaataaaagcaggctgccc

SEQ ID NO: 12801 - DNA, 20 bp, Artificial Sequence
  Description of Artificial Sequence: Synthetic oligonucleotide
  Target: ANGPTL4; (+) strand; PAM type: NRG; PAM sequence: CAG
taaaagcaggctgcccgagc

SEQ ID NO: 12802 - DNA, 20 bp, Artificial Sequence
  Description of Artificial Sequence: Synthetic oligonucleotide
  Target: ANGPTL4; (+) strand; PAM type: NRG; PAM sequence: CAG
aagcaggctgcccgagccag

SEQ ID NO: 12803 - DNA, 20 bp, Artificial Sequence
  Description of Artificial Sequence: Synthetic oligonucleotide
  Target: ANGPTL4; (+) strand; PAM type: NRG; PAM sequence: TGG
caggctgcccgagccagcag

SEQ ID NO: 12804 - DNA, 20 bp, Artificial Sequence
  Description of Artificial Sequence: Synthetic oligonucleotide
  Target: ANGPTL4; (+) strand; PAM type: NRG; PAM sequence: TGG
gccagcagtggcaacccact

SEQ ID NO: 12805 - DNA, 20 bp, Artificial Sequence
  Description of Artificial Sequence: Synthetic oligonucleotide
  Target: ANGPTL4; (+) strand; PAM type: NRG; PAM sequence: GGG
ccagcagtggcaacccactt

SEQ ID NO: 12806 - DNA, 20 bp, Artificial Sequence
  Description of Artificial Sequence: Synthetic oligonucleotide
  Target: ANGPTL4; (+) strand; PAM type: NRG; PAM sequence: TGG
ttgggtccccttccacactg

SEQ ID NO: 12807 - DNA, 20 bp, Artificial Sequence
  Description of Artificial Sequence: Synthetic oligonucleotide
  Target: ANGPTL4; (+) strand; PAM type: NRG; PAM sequence: AAG
ggtccccttccacactgtgg

SEQ ID NO: 12808 - DNA, 20 bp, Artificial Sequence
  Description of Artificial Sequence: Synthetic oligonucleotide
  Target: ANGPTL4; (+) strand; PAM type: NRG; PAM sequence: TGG
atcttgtactgctcactctt

SEQ ID NO: 12809 - DNA, 20 bp, Artificial Sequence
  Description of Artificial Sequence: Synthetic oligonucleotide
  Target: ANGPTL4; (+) strand; PAM type: NRG; PAM sequence: GGG
tcttgtactgctcactcttt

SEQ ID NO: 12810 - DNA, 20 bp, Artificial Sequence
  Description of Artificial Sequence: Synthetic oligonucleotide
  Target: ANGPTL4; (+) strand; PAM type: NRG; PAM sequence: GAG
tgggtccccactgcttttat

SEQ ID NO: 12811 - DNA, 20 bp, Artificial Sequence
  Description of Artificial Sequence: Synthetic oligonucleotide
  Target: ANGPTL4; (+) strand; PAM type: NRG; PAM sequence: AAG
gagctgtaacactcactgcg

SEQ ID NO: 12812 - DNA, 20 bp, Artificial Sequence
  Description of Artificial Sequence: Synthetic oligonucleotide
  Target: ANGPTL4; (+) strand; PAM type: NRG; PAM sequence: AGG
agctgtaacactcactgcga

SEQ ID NO: 12813 - DNA, 20 bp, Artificial Sequence
  Description of Artificial Sequence: Synthetic oligonucleotide
  Target: ANGPTL4; (+) strand; PAM type: NRG; PAM sequence: CAG
acactcactgcgaaggtctg

SEQ ID NO: 12814 - DNA, 20 bp, Artificial Sequence
  Description of Artificial Sequence: Synthetic oligonucleotide
  Target: ANGPTL4; (+) strand; PAM type: NRG; PAM sequence: GAG
aggtctgcagcttcactcct

SEQ ID NO: 12815 - DNA, 20 bp, Artificial Sequence
  Description of Artificial Sequence: Synthetic oligonucleotide
  Target: ANGPTL4; (+) strand; PAM type: NRG; PAM sequence: CAG
ctgcagcttcactcctgagc

SEQ ID NO: 12816 - DNA, 20 bp, Artificial Sequence
  Description of Artificial Sequence: Synthetic oligonucleotide
  Target: ANGPTL4; (+) strand; PAM type: NRG; PAM sequence: CAG
cagtgaaaccatgaacccac

SEQ ID NO: 12817 - DNA, 20 bp, Artificial Sequence
  Description of Artificial Sequence: Synthetic oligonucleotide
  Target: ANGPTL4; (+) strand; PAM type: NRG; PAM sequence: AAG
tgaaaccatgaacccaccag

SEQ ID NO: 12818 - DNA, 20 bp, Artificial Sequence
  Description of Artificial Sequence: Synthetic oligonucleotide
  Target: ANGPTL4; (+) strand; PAM type: NRG; PAM sequence: AGG
gaaaccatgaacccaccaga

SEQ ID NO: 12819 - DNA, 20 bp, Artificial Sequence
  Description of Artificial Sequence: Synthetic oligonucleotide
  Target: ANGPTL4; (+) strand; PAM type: NRG; PAM sequence: AAG
accatgaacccaccagaagg

SEQ ID NO: 12820 - DNA, 20 bp, Artificial Sequence
  Description of Artificial Sequence: Synthetic oligonucleotide
  Target: ANGPTL4; (+) strand; PAM type: NRG; PAM sequence: CAG
cgctgaacacacctgaacat

SEQ ID NO: 12821 - DNA, 20 bp, Artificial Sequence
  Description of Artificial Sequence: Synthetic oligonucleotide
  Target: ANGPTL4; (+) strand; PAM type: NRG; PAM sequence: AAG
tgaacacacctgaacatcag

SEQ ID NO: 12822 - DNA, 20 bp, Artificial Sequence
  Description of Artificial Sequence: Synthetic oligonucleotide
  Target: ANGPTL4; (+) strand; PAM type: NRG; PAM sequence: CAG
acatcagaagaaacaaactc

SEQ ID NO: 12823 - DNA, 20 bp, Artificial Sequence
  Description of Artificial Sequence: Synthetic oligonucleotide
  Target: ANGPTL4; (+) strand; PAM type: NRG; PAM sequence: AAG
aactccagacgcgccacctt

SEQ ID NO: 12824 - DNA, 20 bp, Artificial Sequence
  Description of Artificial Sequence: Synthetic oligonucleotide
  Target: ANGPTL4; (+) strand; PAM type: NRG; PAM sequence: GAG
ctccagacgcgccaccttaa

SEQ ID NO: 12825 - DNA, 20 bp, Artificial Sequence
  Description of Artificial Sequence: Synthetic oligonucleotide
  Target: ANGPTL4; (+) strand; PAM type: NRG; PAM sequence: TGG
agacgcgccaccttaagagc

SEQ ID NO: 12826 - DNA, 20 bp, Artificial Sequence
  Description of Artificial Sequence: Synthetic oligonucleotide
  Target: ANGPTL4; (+) strand; PAM type: NRG; PAM sequence: AAG
agagctggaacacttaccgc

SEQ ID NO: 12827 - DNA, 20 bp, Artificial Sequence
  Description of Artificial Sequence: Synthetic oligonucleotide
  Target: ANGPTL4; (+) strand; PAM type: NRG; PAM sequence: AGG
gagctggaacacttaccgca

SEQ ID NO: 12828 - DNA, 20 bp, Artificial Sequence
  Description of Artificial Sequence: Synthetic oligonucleotide
  Target: ANGPTL4; (+) strand; PAM type: NRG; PAM sequence: GGG
agctggaacacttaccgcaa

SEQ ID NO: 12829 - DNA, 20 bp, Artificial Sequence
  Description of Artificial Sequence: Synthetic oligonucleotide
  Target: ANGPTL4; (+) strand; PAM type: NRG; PAM sequence: TGG
acacttaccgcaagggtcca

SEQ ID NO: 12830 - DNA, 20 bp, Artificial Sequence
  Description of Artificial Sequence: Synthetic oligonucleotide
  Target: ANGPTL4; (+) strand; PAM type: NRG; PAM sequence: AAG
ggtccatggcttcattcttg

SEQ ID NO: 12831 - DNA, 20 bp, Artificial Sequence
  Description of Artificial Sequence: Synthetic oligonucleotide
  Target: ANGPTL4; (+) strand; PAM type: NRG; PAM sequence: CAG
catggcttcattcttgaagt

SEQ ID NO: 12832 - DNA, 20 bp, Artificial Sequence
  Description of Artificial Sequence: Synthetic oligonucleotide
  Target: ANGPTL4; (+) strand; PAM type: NRG; PAM sequence: GAG
gcttcattcttgaagtcagt

SEQ ID NO: 12833 - DNA, 20 bp, Artificial Sequence
  Description of Artificial Sequence: Synthetic oligonucleotide
  Target: ANGPTL4; (+) strand; PAM type: NRG; PAM sequence: AAG
ttcttgaagtcagtgagacc

SEQ ID NO: 12834 - DNA, 20 bp, Artificial Sequence
  Description of Artificial Sequence: Synthetic oligonucleotide
  Target: ANGPTL4; (+) strand; PAM type: NRG; PAM sequence: CGG
gaccaagaaccccccaattc

SEQ ID NO: 12835 - DNA, 20 bp, Artificial Sequence
  Description of Artificial Sequence: Synthetic oligonucleotide
  Target: ANGPTL4; (+) strand; PAM type: NRG; PAM sequence: CAG
gaaccccccaattccggata

SEQ ID NO: 12836 - DNA, 20 bp, Artificial Sequence
  Description of Artificial Sequence: Synthetic oligonucleotide
  Target: ANGPTL4; (+) strand; PAM type: NRG; PAM sequence: CAG
gatacagtgccactgcactc

SEQ ID NO: 12837 - DNA, 20 bp, Artificial Sequence
  Description of Artificial Sequence: Synthetic oligonucleotide
  Target: ANGPTL4; (+) strand; PAM type: NRG; PAM sequence: CAG
agtgccactgcactccagcc

SEQ ID NO: 12838 - DNA, 20 bp, Artificial Sequence
  Description of Artificial Sequence: Synthetic oligonucleotide
  Target: ANGPTL4; (+) strand; PAM type: NRG; PAM sequence: AGG
gtgccactgcactccagccc

SEQ ID NO: 12839 - DNA, 20 bp, Artificial Sequence
  Description of Artificial Sequence: Synthetic oligonucleotide
  Target: ANGPTL4; (+) strand; PAM type: NRG; PAM sequence: CAG
ctgcactccagcccaggcaa

SEQ ID NO: 12840 - DNA, 20 bp, Artificial Sequence
  Description of Artificial Sequence: Synthetic oligonucleotide
  Target: ANGPTL4; (+) strand; PAM type: NRG; PAM sequence: GAG
gcactccagcccaggcaaca

SEQ ID NO: 12841 - DNA, 20 bp, Artificial Sequence
  Description of Artificial Sequence: Synthetic oligonucleotide
  Target: ANGPTL4; (+) strand; PAM type: NRG; PAM sequence: GAG
tccagcccaggcaacagagc

SEQ ID NO: 12842 - DNA, 20 bp, Artificial Sequence
  Description of Artificial Sequence: Synthetic oligonucleotide
  Target: ANGPTL4; (+) strand; PAM type: NRG; PAM sequence: TGG
aaaataaaaattgtaataat

SEQ ID NO: 12843 - DNA, 20 bp, Artificial Sequence
  Description of Artificial Sequence: Synthetic oligonucleotide
  Target: ANGPTL4; (+) strand; PAM type: NRG; PAM sequence: TAG
ataattggataccctacatc

SEQ ID NO: 12844 - DNA, 20 bp, Artificial Sequence
  Description of Artificial Sequence: Synthetic oligonucleotide
  Target: ANGPTL4; (+) strand; PAM type: NRG; PAM sequence: AGG
taattggataccctacatct

SEQ ID NO: 12845 - DNA, 20 bp, Artificial Sequence
  Description of Artificial Sequence: Synthetic oligonucleotide
  Target: ANGPTL4; (+) strand; PAM type: NRG; PAM sequence: GAG
tacatctaggacatgtattt

SEQ ID NO: 12846 - DNA, 20 bp, Artificial Sequence
  Description of Artificial Sequence: Synthetic oligonucleotide
  Target: ANGPTL4; (+) strand; PAM type: NRG; PAM sequence: AGG
acatctaggacatgtatttg

SEQ ID NO: 12847 - DNA, 20 bp, Artificial Sequence
  Description of Artificial Sequence: Synthetic oligonucleotide
  Target: ANGPTL4; (+) strand; PAM type: NRG; PAM sequence: CAG
tctgtccattttctgaaccc

SEQ ID NO: 12848 - DNA, 20 bp, Artificial Sequence
  Description of Artificial Sequence: Synthetic oligonucleotide
  Target: ANGPTL4; (+) strand; PAM type: NRG; PAM sequence: GAG
ttttttttttttttttttcc

SEQ ID NO: 12849 - DNA, 20 bp, Artificial Sequence
  Description of Artificial Sequence: Synthetic oligonucleotide
  Target: ANGPTL4; (+) strand; PAM type: NRG; PAM sequence: AAG
tttttttttttttccgagac

SEQ ID NO: 12850 - DNA, 20 bp, Artificial Sequence
  Description of Artificial Sequence: Synthetic oligonucleotide
  Target: ANGPTL4; (+) strand; PAM type: NRG; PAM sequence: GAG
tttttttttttccgagacaa

SEQ ID NO: 12851 - DNA, 20 bp, Artificial Sequence
  Description of Artificial Sequence: Synthetic oligonucleotide
  Target: ANGPTL4; (+) strand; PAM type: NRG; PAM sequence: CAG
aagagtctcactctgtcacc

SEQ ID NO: 12852 - DNA, 20 bp, Artificial Sequence
  Description of Artificial Sequence: Synthetic oligonucleotide
  Target: ANGPTL4; (+) strand; PAM type: NRG; PAM sequence: AGG
agagtctcactctgtcaccc

SEQ ID NO: 12853 - DNA, 20 bp, Artificial Sequence
  Description of Artificial Sequence: Synthetic oligonucleotide
  Target: ANGPTL4; (+) strand; PAM type: NRG; PAM sequence: TGG
tctcactctgtcacccaggc

SEQ ID NO: 12854 - DNA, 20 bp, Artificial Sequence
  Description of Artificial Sequence: Synthetic oligonucleotide
  Target: ANGPTL4; (+) strand; PAM type: NRG; PAM sequence: GAG
tcactctgtcacccaggctg

SEQ ID NO: 12855 - DNA, 20 bp, Artificial Sequence
  Description of Artificial Sequence: Synthetic oligonucleotide
  Target: ANGPTL4; (+) strand; PAM type: NRG; PAM sequence: CGG
ctgtcacccaggctggagcg

SEQ ID NO: 12856 - DNA, 20 bp, Artificial Sequence
  Description of Artificial Sequence: Synthetic oligonucleotide
  Target: ANGPTL4; (+) strand; PAM type: NRG; PAM sequence: TAG
tcacccaggctggagcgcgg

SEQ ID NO: 12857 - DNA, 20 bp, Artificial Sequence
  Description of Artificial Sequence: Synthetic oligonucleotide
  Target: ANGPTL4; (+) strand; PAM type: NRG; PAM sequence: CAG
ggagcgcggtagtgcgatct

SEQ ID NO: 12858 - DNA, 20 bp, Artificial Sequence
  Description of Artificial Sequence: Synthetic oligonucleotide
  Target: ANGPTL4; (+) strand; PAM type: NRG; PAM sequence: CGG
ttactgcaacctccacctcc

SEQ ID NO: 12859 - DNA, 20 bp, Artificial Sequence
  Description of Artificial Sequence: Synthetic oligonucleotide
  Target: ANGPTL4; (+) strand; PAM type: NRG; PAM sequence: GGG
tactgcaacctccacctccc

SEQ ID NO: 12860 - DNA, 20 bp, Artificial Sequence
  Description of Artificial Sequence: Synthetic oligonucleotide
  Target: ANGPTL4; (+) strand; PAM type: NRG; PAM sequence: AAG
aacctccacctcccgggttc

SEQ ID NO: 12861 - DNA, 20 bp, Artificial Sequence
  Description of Artificial Sequence: Synthetic oligonucleotide
  Target: ANGPTL4; (+) strand; PAM type: NRG; PAM sequence: CGG
ttcaagcgattctcctgcct

SEQ ID NO: 12862 - DNA, 20 bp, Artificial Sequence
  Description of Artificial Sequence: Synthetic oligonucleotide
  Target: ANGPTL4; (+) strand; PAM type: NRG; PAM sequence: GAG
ttctcctgcctcggcctccc

SEQ ID NO: 12863 - DNA, 20 bp, Artificial Sequence
  Description of Artificial Sequence: Synthetic oligonucleotide
  Target: ANGPTL4; (+) strand; PAM type: NRG; PAM sequence: TAG
tcctgcctcggcctcccgag

SEQ ID NO: 12864 - DNA, 20 bp, Artificial Sequence
  Description of Artificial Sequence: Synthetic oligonucleotide
  Target: ANGPTL4; (+) strand; PAM type: NRG; PAM sequence: GAG
cctcggcctcccgagtagct

SEQ ID NO: 12865 - DNA, 20 bp, Artificial Sequence
  Description of Artificial Sequence: Synthetic oligonucleotide
  Target: ANGPTL4; (+) strand; PAM type: NRG; PAM sequence: CAG
ctcccgagtagctgagatta

SEQ ID NO: 12866 - DNA, 20 bp, Artificial Sequence
  Description of Artificial Sequence: Synthetic oligonucleotide
  Target: ANGPTL4; (+) strand; PAM type: NRG; PAM sequence: AGG
tcccgagtagctgagattac

SEQ ID NO: 12867 - DNA, 20 bp, Artificial Sequence
  Description of Artificial Sequence: Synthetic oligonucleotide
  Target: ANGPTL4; (+) strand; PAM type: NRG; PAM sequence: CAG
caggcgcctcccactgcacc

SEQ ID NO: 12868 - DNA, 20 bp, Artificial Sequence
  Description of Artificial Sequence: Synthetic oligonucleotide
  Target: ANGPTL4; (+) strand; PAM type: NRG; PAM sequence: TAG
ccagctaatttttgtatttt

SEQ ID NO: 12869 - DNA, 20 bp, Artificial Sequence
  Description of Artificial Sequence: Synthetic oligonucleotide
  Target: ANGPTL4; (+) strand; PAM type: NRG; PAM sequence: TAG
taatttttgtatttttagta

SEQ ID NO: 12870 - DNA, 20 bp, Artificial Sequence
  Description of Artificial Sequence: Synthetic oligonucleotide
  Target: ANGPTL4; (+) strand; PAM type: NRG; PAM sequence: TGG
ttttgtatttttagtataga

SEQ ID NO: 12871 - DNA, 20 bp, Artificial Sequence
  Description of Artificial Sequence: Synthetic oligonucleotide
  Target: ANGPTL4; (+) strand; PAM type: NRG; PAM sequence: GGG
tttgtatttttagtatagat

SEQ ID NO: 12872 - DNA, 20 bp, Artificial Sequence
  Description of Artificial Sequence: Synthetic oligonucleotide
  Target: ANGPTL4; (+) strand; PAM type: NRG; PAM sequence: TGG
atttttagtatagatgggtt

SEQ ID NO: 12873 - DNA, 20 bp, Artificial Sequence
  Description of Artificial Sequence: Synthetic oligonucleotide
  Target: ANGPTL4; (+) strand; PAM type: NRG; PAM sequence: CAG
ttagtatagatgggtttggc

SEQ ID NO: 12874 - DNA, 20 bp, Artificial Sequence
  Description of Artificial Sequence: Synthetic oligonucleotide
  Target: ANGPTL4; (+) strand; PAM type: NRG; PAM sequence: AGG
tagtatagatgggtttggcc

SEQ ID NO: 12875 - DNA, 20 bp, Artificial Sequence
  Description of Artificial Sequence: Synthetic oligonucleotide
  Target: ANGPTL4; (+) strand; PAM type: NRG; PAM sequence: TGG
atagatgggtttggccaggc

SEQ ID NO: 12876 - DNA, 20 bp, Artificial Sequence
  Description of Artificial Sequence: Synthetic oligonucleotide
  Target: ANGPTL4; (+) strand; PAM type: NRG; PAM sequence: AAG
ggtctcaaactcctgacctc

SEQ ID NO: 12877 - DNA, 20 bp, Artificial Sequence
  Description of Artificial Sequence: Synthetic oligonucleotide
  Target: ANGPTL4; (+) strand; PAM type: NRG; PAM sequence: CGG
ctcaagtgatctgcccgcct

SEQ ID NO: 12878 - DNA, 20 bp, Artificial Sequence
  Description of Artificial Sequence: Synthetic oligonucleotide
  Target: ANGPTL4; (+) strand; PAM type: NRG; PAM sequence: TGG
cccgcctcggcctccgaaac

SEQ ID NO: 12879 - DNA, 20 bp, Artificial Sequence
  Description of Artificial Sequence: Synthetic oligonucleotide
  Target: ANGPTL4; (+) strand; PAM type: NRG; PAM sequence: TGG
gcctcggcctccgaaactgg

SEQ ID NO: 12880 - DNA, 20 bp, Artificial Sequence
  Description of Artificial Sequence: Synthetic oligonucleotide
  Target: ANGPTL4; (+) strand; PAM type: NRG; PAM sequence: GGG
cctcggcctccgaaactggt

SEQ ID NO: 12881 - DNA, 20 bp, Artificial Sequence
  Description of Artificial Sequence: Synthetic oligonucleotide
  Target: ANGPTL4; (+) strand; PAM type: NRG; PAM sequence: CAG
ctccgaaactggtgggatta

SEQ ID NO: 12882 - DNA, 20 bp, Artificial Sequence
  Description of Artificial Sequence: Synthetic oligonucleotide
  Target: ANGPTL4; (+) strand; PAM type: NRG; PAM sequence: AGG
tccgaaactggtgggattac

SEQ ID NO: 12883 - DNA, 20 bp, Artificial Sequence
  Description of Artificial Sequence: Synthetic oligonucleotide
  Target: ANGPTL4; (+) strand; PAM type: NRG; PAM sequence: AAG
actggtgggattacaggcgc

SEQ ID NO: 12884 - DNA, 20 bp, Artificial Sequence
  Description of Artificial Sequence: Synthetic oligonucleotide
  Target: ANGPTL4; (+) strand; PAM type: NRG; PAM sequence: CGG
caggcgcaagccactgtgcc

SEQ ID NO: 12885 - DNA, 20 bp, Artificial Sequence
  Description of Artificial Sequence: Synthetic oligonucleotide
  Target: ANGPTL4; (+) strand; PAM type: NRG; PAM sequence: CAG
ctgttaatttatttttgccc

SEQ ID NO: 12886 - DNA, 20 bp, Artificial Sequence
  Description of Artificial Sequence: Synthetic oligonucleotide
  Target: ANGPTL4; (+) strand; PAM type: NRG; PAM sequence: TAG
ctccctccaaatattcctta

SEQ ID NO: 12887 - DNA, 20 bp, Artificial Sequence
  Description of Artificial Sequence: Synthetic oligonucleotide
  Target: ANGPTL4; (+) strand; PAM type: NRG; PAM sequence: TGG
tattccttatagatgtctct

SEQ ID NO: 12888 - DNA, 20 bp, Artificial Sequence
  Description of Artificial Sequence: Synthetic oligonucleotide
  Target: ANGPTL4; (+) strand; PAM type: NRG; PAM sequence: GGG
attccttatagatgtctctt

SEQ ID NO: 12889 - DNA, 20 bp, Artificial Sequence
  Description of Artificial Sequence: Synthetic oligonucleotide
  Target: ANGPTL4; (+) strand; PAM type: NRG; PAM sequence: GGG
ttccttatagatgtctcttg

SEQ ID NO: 12890 - DNA, 20 bp, Artificial Sequence
  Description of Artificial Sequence: Synthetic oligonucleotide
  Target: ANGPTL4; (+) strand; PAM type: NRG; PAM sequence: GAG
ccttatagatgtctcttggg

SEQ ID NO: 12891 - DNA, 20 bp, Artificial Sequence
  Description of Artificial Sequence: Synthetic oligonucleotide
  Target: ANGPTL4; (+) strand; PAM type: NRG; PAM sequence: AGG
cttatagatgtctcttgggg

SEQ ID NO: 12892 - DNA, 20 bp, Artificial Sequence
  Description of Artificial Sequence: Synthetic oligonucleotide
  Target: ANGPTL4; (+) strand; PAM type: NRG; PAM sequence: TGG
atagatgtctcttggggagg

SEQ ID NO: 12893 - DNA, 20 bp, Artificial Sequence
  Description of Artificial Sequence: Synthetic oligonucleotide
  Target: ANGPTL4; (+) strand; PAM type: NRG; PAM sequence: TGG
gatgtctcttggggaggtgg

SEQ ID NO: 12894 - DNA, 20 bp, Artificial Sequence
  Description of Artificial Sequence: Synthetic oligonucleotide
  Target: ANGPTL4; (+) strand; PAM type: NRG; PAM sequence: GGG
atgtctcttggggaggtggt

SEQ ID NO: 12895 - DNA, 20 bp, Artificial Sequence
  Description of Artificial Sequence: Synthetic oligonucleotide
  Target: ANGPTL4; (+) strand; PAM type: NRG; PAM sequence: GGG
tgtctcttggggaggtggtg

SEQ ID NO: 12896 - DNA, 20 bp, Artificial Sequence
  Description of Artificial Sequence: Synthetic oligonucleotide
  Target: ANGPTL4; (+) strand; PAM type: NRG; PAM sequence: GGG
gtctcttggggaggtggtgg

SEQ ID NO: 12897 - DNA, 20 bp, Artificial Sequence
  Description of Artificial Sequence: Synthetic oligonucleotide
  Target: ANGPTL4; (+) strand; PAM type: NRG; PAM sequence: TAG
ggtggtgggggttcttgcgc

SEQ ID NO: 12898 - DNA, 20 bp, Artificial Sequence
  Description of Artificial Sequence: Synthetic oligonucleotide
  Target: ANGPTL4; (+) strand; PAM type: NRG; PAM sequence: AAG
ggtgggggttcttgcgctag

SEQ ID NO: 12899 - DNA, 20 bp, Artificial Sequence
  Description of Artificial Sequence: Synthetic oligonucleotide
  Target: ANGPTL4; (+) strand; PAM type: NRG; PAM sequence: TGG
ttccttgtcttgacccttcc

SEQ ID NO: 12900 - DNA, 20 bp, Artificial Sequence
  Description of Artificial Sequence: Synthetic oligonucleotide
  Target: ANGPTL4; (+) strand; PAM type: NRG; PAM sequence: CAG
cttgtcttgacccttcctgg

SEQ ID NO: 12901 - DNA, 20 bp, Artificial Sequence
  Description of Artificial Sequence: Synthetic oligonucleotide
  Target: ANGPTL4; (+) strand; PAM type: NRG; PAM sequence: AGG
ttgtcttgacccttcctggc

SEQ ID NO: 12902 - DNA, 20 bp, Artificial Sequence
  Description of Artificial Sequence: Synthetic oligonucleotide
  Target: ANGPTL4; (+) strand; PAM type: NRG; PAM sequence: TGG
tgacccttcctggcaggtgc

SEQ ID NO: 12903 - DNA, 20 bp, Artificial Sequence
  Description of Artificial Sequence: Synthetic oligonucleotide
  Target: ANGPTL4; (+) strand; PAM type: NRG; PAM sequence: GGG
gacccttcctggcaggtgct

SEQ ID NO: 12904 - DNA, 20 bp, Artificial Sequence
  Description of Artificial Sequence: Synthetic oligonucleotide
  Target: ANGPTL4; (+) strand; PAM type: NRG; PAM sequence: GGG
acccttcctggcaggtgctg

SEQ ID NO: 12905 - DNA, 20 bp, Artificial Sequence
  Description of Artificial Sequence: Synthetic oligonucleotide
  Target: ANGPTL4; (+) strand; PAM type: NRG; PAM sequence: CAG
cctggcaggtgctggggaca

SEQ ID NO: 12906 - DNA, 20 bp, Artificial Sequence
  Description of Artificial Sequence: Synthetic oligonucleotide
  Target: ANGPTL4; (+) strand; PAM type: NRG; PAM sequence: TGG
tggggacacagctgtttccc

SEQ ID NO: 12907 - DNA, 20 bp, Artificial Sequence
  Description of Artificial Sequence: Synthetic oligonucleotide
  Target: ANGPTL4; (+) strand; PAM type: NRG; PAM sequence: GGG
ggggacacagctgtttccct

SEQ ID NO: 12908 - DNA, 20 bp, Artificial Sequence
  Description of Artificial Sequence: Synthetic oligonucleotide
  Target: ANGPTL4; (+) strand; PAM type: NRG; PAM sequence: GGG
gggacacagctgtttccctg

SEQ ID NO: 12909 - DNA, 20 bp, Artificial Sequence
  Description of Artificial Sequence: Synthetic oligonucleotide
  Target: ANGPTL4; (+) strand; PAM type: NRG; PAM sequence: TGG
cagctgtttccctggggctg

SEQ ID NO: 12910 - DNA, 20 bp, Artificial Sequence
  Description of Artificial Sequence: Synthetic oligonucleotide
  Target: ANGPTL4; (+) strand; PAM type: NRG; PAM sequence: TGG
tgtttccctggggctgtggc

SEQ ID NO: 12911 - DNA, 20 bp, Artificial Sequence
  Description of Artificial Sequence: Synthetic oligonucleotide
  Target: ANGPTL4; (+) strand; PAM type: NRG; PAM sequence: GGG
gtttccctggggctgtggct

SEQ ID NO: 12912 - DNA, 20 bp, Artificial Sequence
  Description of Artificial Sequence: Synthetic oligonucleotide
  Target: ANGPTL4; (+) strand; PAM type: NRG; PAM sequence: TAG
cctggggctgtggctgggta

SEQ ID NO: 12913 - DNA, 20 bp, Artificial Sequence
  Description of Artificial Sequence: Synthetic oligonucleotide
  Target: ANGPTL4; (+) strand; PAM type: NRG; PAM sequence: AGG
ctggggctgtggctgggtat

SEQ ID NO: 12914 - DNA, 20 bp, Artificial Sequence
  Description of Artificial Sequence: Synthetic oligonucleotide
  Target: ANGPTL4; (+) strand; PAM type: NRG; PAM sequence: TAG
ggtataggtgacaaactttt

SEQ ID NO: 12915 - DNA, 20 bp, Artificial Sequence
  Description of Artificial Sequence: Synthetic oligonucleotide
  Target: ANGPTL4; (+) strand; PAM type: NRG; PAM sequence: TAG
tgacaaactttttagctttg

SEQ ID NO: 12916 - DNA, 20 bp, Artificial Sequence
  Description of Artificial Sequence: Synthetic oligonucleotide
  Target: ANGPTL4; (+) strand; PAM type: NRG; PAM sequence: GAG
acaaactttttagctttgta

SEQ ID NO: 12917 - DNA, 20 bp, Artificial Sequence
  Description of Artificial Sequence: Synthetic oligonucleotide
  Target: ANGPTL4; (+) strand; PAM type: NRG; PAM sequence: AGG
caaactttttagctttgtag

SEQ ID NO: 12918 - DNA, 20 bp, Artificial Sequence
  Description of Artificial Sequence: Synthetic oligonucleotide
  Target: ANGPTL4; (+) strand; PAM type: NRG; PAM sequence: TAG
actttttagctttgtagagg

SEQ ID NO: 12919 - DNA, 20 bp, Artificial Sequence
  Description of Artificial Sequence: Synthetic oligonucleotide
  Target: ANGPTL4; (+) strand; PAM type: NRG; PAM sequence: AGG
ctttttagctttgtagaggt

SEQ ID NO: 12920 - DNA, 20 bp, Artificial Sequence
  Description of Artificial Sequence: Synthetic oligonucleotide
  Target: ANGPTL4; (+) strand; PAM type: NRG; PAM sequence: CAG
ctttgtagaggtaggtccta

SEQ ID NO: 12921 - DNA, 20 bp, Artificial Sequence
  Description of Artificial Sequence: Synthetic oligonucleotide
  Target: ANGPTL4; (+) strand; PAM type: NRG; PAM sequence: CAG
gaggtaggtcctacagctgc

SEQ ID NO: 12922 - DNA, 20 bp, Artificial Sequence
  Description of Artificial Sequence: Synthetic oligonucleotide
  Target: ANGPTL4; (+) strand; PAM type: NRG; PAM sequence: AGG
aggtaggtcctacagctgcc

SEQ ID NO: 12923 - DNA, 20 bp, Artificial Sequence
  Description of Artificial Sequence: Synthetic oligonucleotide
  Target: ANGPTL4; (+) strand; PAM type: NRG; PAM sequence: CAG
aggtcctacagctgccaggc

SEQ ID NO: 12924 - DNA, 20 bp, Artificial Sequence
  Description of Artificial Sequence: Synthetic oligonucleotide
  Target: ANGPTL4; (+) strand; PAM type: NRG; PAM sequence: AGG
ggtcctacagctgccaggcc

SEQ ID NO: 12925 - DNA, 20 bp, Artificial Sequence
  Description of Artificial Sequence: Synthetic oligonucleotide
  Target: ANGPTL4; (+) strand; PAM type: NRG; PAM sequence: GGG
gtcctacagctgccaggcca

SEQ ID NO: 12926 - DNA, 20 bp, Artificial Sequence
  Description of Artificial Sequence: Synthetic oligonucleotide
  Target: ANGPTL4; (+) strand; PAM type: NRG; PAM sequence: GAG
cctacagctgccaggccagg

SEQ ID NO: 12927 - DNA, 20 bp, Artificial Sequence
  Description of Artificial Sequence: Synthetic oligonucleotide
  Target: ANGPTL4; (+) strand; PAM type: NRG; PAM sequence: AGG
ctacagctgccaggccaggg

SEQ ID NO: 12928 - DNA, 20 bp, Artificial Sequence
  Description of Artificial Sequence: Synthetic oligonucleotide
  Target: ANGPTL4; (+) strand; PAM type: NRG; PAM sequence: TAG
agctgccaggccagggaggc

SEQ ID NO: 12929 - DNA, 20 bp, Artificial Sequence
  Description of Artificial Sequence: Synthetic oligonucleotide
  Target: ANGPTL4; (+) strand; PAM type: NRG; PAM sequence: GAG
ctgccaggccagggaggcta

SEQ ID NO: 12930 - DNA, 20 bp, Artificial Sequence
  Description of Artificial Sequence: Synthetic oligonucleotide
  Target: ANGPTL4; (+) strand; PAM type: NRG; PAM sequence: AGG
tgccaggccagggaggctag

SEQ ID NO: 12931 - DNA, 20 bp, Artificial Sequence
  Description of Artificial Sequence: Synthetic oligonucleotide
  Target: ANGPTL4; (+) strand; PAM type: NRG; PAM sequence: CAG
aggctagaggctgccctctc

SEQ ID NO: 12932 - DNA, 20 bp, Artificial Sequence
  Description of Artificial Sequence: Synthetic oligonucleotide
  Target: ANGPTL4; (+) strand; PAM type: NRG; PAM sequence: AGG
ggctagaggctgccctctcc

SEQ ID NO: 12933 - DNA, 20 bp, Artificial Sequence
  Description of Artificial Sequence: Synthetic oligonucleotide
  Target: ANGPTL4; (+) strand; PAM type: NRG; PAM sequence: GAG
gtttgcctgtgtcctgtact

SEQ ID NO: 12934 - DNA, 20 bp, Artificial Sequence
  Description of Artificial Sequence: Synthetic oligonucleotide
  Target: ANGPTL4; (+) strand; PAM type: NRG; PAM sequence: CAG
tgcctgtgtcctgtactgag

SEQ ID NO: 12935 - DNA, 20 bp, Artificial Sequence
  Description of Artificial Sequence: Synthetic oligonucleotide
  Target: ANGPTL4; (+) strand; PAM type: NRG; PAM sequence: AGG
gcctgtgtcctgtactgagc

SEQ ID NO: 12936 - DNA, 20 bp, Artificial Sequence
  Description of Artificial Sequence: Synthetic oligonucleotide
  Target: ANGPTL4; (+) strand; PAM type: NRG; PAM sequence: TAG
tgtcctgtactgagcaggct

SEQ ID NO: 12937 - DNA, 20 bp, Artificial Sequence
  Description of Artificial Sequence: Synthetic oligonucleotide
  Target: ANGPTL4; (+) strand; PAM type: NRG; PAM sequence: GAG
tcctgtactgagcaggctta

SEQ ID NO: 12938 - DNA, 20 bp, Artificial Sequence
  Description of Artificial Sequence: Synthetic oligonucleotide
  Target: ANGPTL4; (+) strand; PAM type: NRG; PAM sequence: AGG
cctgtactgagcaggcttag

SEQ ID NO: 12939 - DNA, 20 bp, Artificial Sequence
  Description of Artificial Sequence: Synthetic oligonucleotide
  Target: ANGPTL4; (+) strand; PAM type: NRG; PAM sequence: GAG
aggcttagaggatctcctct

SEQ ID NO: 12940 - DNA, 20 bp, Artificial Sequence
  Description of Artificial Sequence: Synthetic oligonucleotide
  Target: ANGPTL4; (+) strand; PAM type: NRG; PAM sequence: TGG
tcctctgagcccactgtcac

SEQ ID NO: 12941 - DNA, 20 bp, Artificial Sequence
  Description of Artificial Sequence: Synthetic oligonucleotide
  Target: ANGPTL4; (+) strand; PAM type: NRG; PAM sequence: GAG
ctctgagcccactgtcactg

SEQ ID NO: 12942 - DNA, 20 bp, Artificial Sequence
  Description of Artificial Sequence: Synthetic oligonucleotide
  Target: ANGPTL4; (+) strand; PAM type: NRG; PAM sequence: TGG
gagcccactgtcactggagc

SEQ ID NO: 12943 - DNA, 20 bp, Artificial Sequence
  Description of Artificial Sequence: Synthetic oligonucleotide
  Target: ANGPTL4; (+) strand; PAM type: NRG; PAM sequence: TGG
cccactgtcactggagctgg

SEQ ID NO: 12944 - DNA, 20 bp, Artificial Sequence
  Description of Artificial Sequence: Synthetic oligonucleotide
  Target: ANGPTL4; (+) strand; PAM type: NRG; PAM sequence: GAG
ctgtcactggagctggtggt

SEQ ID NO: 12945 - DNA, 20 bp, Artificial Sequence
  Description of Artificial Sequence: Synthetic oligonucleotide
  Target: ANGPTL4; (+) strand; PAM type: NRG; PAM sequence: CAG
actggagctggtggtgagtc

SEQ ID NO: 12946 - DNA, 20 bp, Artificial Sequence
  Description of Artificial Sequence: Synthetic oligonucleotide
  Target: ANGPTL4; (+) strand; PAM type: NRG; PAM sequence: CAG
ctggtggtgagtccagtctg

SEQ ID NO: 12947 - DNA, 20 bp, Artificial Sequence
  Description of Artificial Sequence: Synthetic oligonucleotide
  Target: ANGPTL4; (+) strand; PAM type: NRG; PAM sequence: AGG
tggtggtgagtccagtctgc

SEQ ID NO: 12948 - DNA, 20 bp, Artificial Sequence
  Description of Artificial Sequence: Synthetic oligonucleotide
  Target: ANGPTL4; (+) strand; PAM type: NRG; PAM sequence: GAG
gtggtgagtccagtctgcag

SEQ ID NO: 12949 - DNA, 20 bp, Artificial Sequence
  Description of Artificial Sequence: Synthetic oligonucleotide
  Target: ANGPTL4; (+) strand; PAM type: NRG; PAM sequence: GAG
ggtgagtccagtctgcagga

SEQ ID NO: 12950 - DNA, 20 bp, Artificial Sequence
  Description of Artificial Sequence: Synthetic oligonucleotide
  Target: ANGPTL4; (+) strand; PAM type: NRG; PAM sequence: AGG
gtgagtccagtctgcaggag

SEQ ID NO: 12951 - DNA, 20 bp, Artificial Sequence
  Description of Artificial Sequence: Synthetic oligonucleotide
  Target: ANGPTL4; (+) strand; PAM type: NRG; PAM sequence: GGG
tgagtccagtctgcaggaga

SEQ ID NO: 12952 - DNA, 20 bp, Artificial Sequence
  Description of Artificial Sequence: Synthetic oligonucleotide
  Target: ANGPTL4; (+) strand; PAM type: NRG; PAM sequence: GGG
gagtccagtctgcaggagag

SEQ ID NO: 12953 - DNA, 20 bp, Artificial Sequence
  Description of Artificial Sequence: Synthetic oligonucleotide
  Target: ANGPTL4; (+) strand; PAM type: NRG; PAM sequence: GGG
agtccagtctgcaggagagg

SEQ ID NO: 12954 - DNA, 20 bp, Artificial Sequence
  Description of Artificial Sequence: Synthetic oligonucleotide
  Target: ANGPTL4; (+) strand; PAM type: NRG; PAM sequence: TAG
tgcaggagagggggttcctc

SEQ ID NO: 12955 - DNA, 20 bp, Artificial Sequence
  Description of Artificial Sequence: Synthetic oligonucleotide
  Target: ANGPTL4; (+) strand; PAM type: NRG; PAM sequence: CAG
agccacaccctcttcatttc

SEQ ID NO: 12956 - DNA, 20 bp, Artificial Sequence
  Description of Artificial Sequence: Synthetic oligonucleotide
  Target: ANGPTL4; (+) strand; PAM type: NRG; PAM sequence: AGG
gccacaccctcttcatttcc

SEQ ID NO: 12957 - DNA, 20 bp, Artificial Sequence
  Description of Artificial Sequence: Synthetic oligonucleotide
  Target: ANGPTL4; (+) strand; PAM type: NRG; PAM sequence: TGG
tttccaggctctgccaatga

SEQ ID NO: 12958 - DNA, 20 bp, Artificial Sequence
  Description of Artificial Sequence: Synthetic oligonucleotide
  Target: ANGPTL4; (+) strand; PAM type: NRG; PAM sequence: GGG
ttccaggctctgccaatgat

SEQ ID NO: 12959 - DNA, 20 bp, Artificial Sequence
  Description of Artificial Sequence: Synthetic oligonucleotide
  Target: ANGPTL4; (+) strand; PAM type: NRG; PAM sequence: CAG
caatgtcatcctttttcctg

SEQ ID NO: 12960 - DNA, 20 bp, Artificial Sequence
  Description of Artificial Sequence: Synthetic oligonucleotide
  Target: ANGPTL4; (+) strand; PAM type: NRG; PAM sequence: AAG
ctgcagccaccttgacctca

SEQ ID NO: 12961 - DNA, 20 bp, Artificial Sequence
  Description of Artificial Sequence: Synthetic oligonucleotide
  Target: ANGPTL4; (+) strand; PAM type: NRG; PAM sequence: TGG
catttcctgcccctccaacc

SEQ ID NO: 12962 - DNA, 20 bp, Artificial Sequence
  Description of Artificial Sequence: Synthetic oligonucleotide
  Target: ANGPTL4; (+) strand; PAM type: NRG; PAM sequence: GGG
atttcctgcccctccaacct

SEQ ID NO: 12963 - DNA, 20 bp, Artificial Sequence
  Description of Artificial Sequence: Synthetic oligonucleotide
  Target: ANGPTL4; (+) strand; PAM type: NRG; PAM sequence: GGG
tttcctgcccctccaacctg

SEQ ID NO: 12964 - DNA, 20 bp, Artificial Sequence
  Description of Artificial Sequence: Synthetic oligonucleotide
  Target: ANGPTL4; (+) strand; PAM type: NRG; PAM sequence: CAG
ccctccaacctggggaacga

SEQ ID NO: 12965 - DNA, 20 bp, Artificial Sequence
  Description of Artificial Sequence: Synthetic oligonucleotide
  Target: ANGPTL4; (+) strand; PAM type: NRG; PAM sequence: TGG
aaaaaaaaaaaaccaccacc

SEQ ID NO: 12966 - DNA, 20 bp, Artificial Sequence
  Description of Artificial Sequence: Synthetic oligonucleotide
  Target: ANGPTL4; (+) strand; PAM type: NRG; PAM sequence: GGG
aaaaaaaaaaaccaccacct

SEQ ID NO: 12967 - DNA, 20 bp, Artificial Sequence
  Description of Artificial Sequence: Synthetic oligonucleotide
  Target: ANGPTL4; (+) strand; PAM type: NRG; PAM sequence: CGG
aaaaaaccaccacctgggca

SEQ ID NO: 12968 - DNA, 20 bp, Artificial Sequence
  Description of Artificial Sequence: Synthetic oligonucleotide
  Target: ANGPTL4; (+) strand; PAM type: NRG; PAM sequence: TGG
aaaccaccacctgggcacgg

SEQ ID NO: 12969 - DNA, 20 bp, Artificial Sequence
  Description of Artificial Sequence: Synthetic oligonucleotide
  Target: ANGPTL4; (+) strand; PAM type: NRG; PAM sequence: TGG
ctcctacactccccgcactc

SEQ ID NO: 12970 - DNA, 20 bp, Artificial Sequence
  Description of Artificial Sequence: Synthetic oligonucleotide
  Target: ANGPTL4; (+) strand; PAM type: NRG; PAM sequence: GGG
tcctacactccccgcactct

SEQ ID NO: 12971 - DNA, 20 bp, Artificial Sequence
  Description of Artificial Sequence: Synthetic oligonucleotide
  Target: ANGPTL4; (+) strand; PAM type: NRG; PAM sequence: GAG
ctacactccccgcactctgg

SEQ ID NO: 12972 - DNA, 20 bp, Artificial Sequence
  Description of Artificial Sequence: Synthetic oligonucleotide
  Target: ANGPTL4; (+) strand; PAM type: NRG; PAM sequence: AGG
tacactccccgcactctggg

SEQ ID NO: 12973 - DNA, 20 bp, Artificial Sequence
  Description of Artificial Sequence: Synthetic oligonucleotide
  Target: ANGPTL4; (+) strand; PAM type: NRG; PAM sequence: GAG
tccccgcactctgggaggct

SEQ ID NO: 12974 - DNA, 20 bp, Artificial Sequence
  Description of Artificial Sequence: Synthetic oligonucleotide
  Target: ANGPTL4; (+) strand; PAM type: NRG; PAM sequence: AGG
ccccgcactctgggaggctg

SEQ ID NO: 12975 - DNA, 20 bp, Artificial Sequence
  Description of Artificial Sequence: Synthetic oligonucleotide
  Target: ANGPTL4; (+) strand; PAM type: NRG; PAM sequence: TGG
cgcactctgggaggctgagg

SEQ ID NO: 12976 - DNA, 20 bp, Artificial Sequence
  Description of Artificial Sequence: Synthetic oligonucleotide
  Target: ANGPTL4; (+) strand; PAM type: NRG; PAM sequence: GGG
gcactctgggaggctgaggt

SEQ ID NO: 12977 - DNA, 20 bp, Artificial Sequence
  Description of Artificial Sequence: Synthetic oligonucleotide
  Target: ANGPTL4; (+) strand; PAM type: NRG; PAM sequence: TAG
ctctgggaggctgaggtggg

SEQ ID NO: 12978 - DNA, 20 bp, Artificial Sequence
  Description of Artificial Sequence: Synthetic oligonucleotide
  Target: ANGPTL4; (+) strand; PAM type: NRG; PAM sequence: AAG
ggctgaggtgggtagatcac

SEQ ID NO: 12979 - DNA, 20 bp, Artificial Sequence
  Description of Artificial Sequence: Synthetic oligonucleotide
  Target: ANGPTL4; (+) strand; PAM type: NRG; PAM sequence: AGG
gctgaggtgggtagatcaca

SEQ ID NO: 12980 - DNA, 20 bp, Artificial Sequence
  Description of Artificial Sequence: Synthetic oligonucleotide
  Target: ANGPTL4; (+) strand; PAM type: NRG; PAM sequence: CAG
aggtgggtagatcacaaggt

SEQ ID NO: 12981 - DNA, 20 bp, Artificial Sequence
  Description of Artificial Sequence: Synthetic oligonucleotide
  Target: ANGPTL4; (+) strand; PAM type: NRG; PAM sequence: AGG
ggtgggtagatcacaaggtc

SEQ ID NO: 12982 - DNA, 20 bp, Artificial Sequence
  Description of Artificial Sequence: Synthetic oligonucleotide
  Target: ANGPTL4; (+) strand; PAM type: NRG; PAM sequence: GAG
tgggtagatcacaaggtcag

SEQ ID NO: 12983 - DNA, 20 bp, Artificial Sequence
  Description of Artificial Sequence: Synthetic oligonucleotide
  Target: ANGPTL4; (+) strand; PAM type: NRG; PAM sequence: AAG
gatcacaaggtcaggagatc

SEQ ID NO: 12984 - DNA, 20 bp, Artificial Sequence
  Description of Artificial Sequence: Synthetic oligonucleotide
  Target: ANGPTL4; (+) strand; PAM type: NRG; PAM sequence: TGG
tcaggagatcaagaccatac

SEQ ID NO: 12985 - DNA, 20 bp, Artificial Sequence
  Description of Artificial Sequence: Synthetic oligonucleotide
  Target: ANGPTL4; (+) strand; PAM type: NRG; PAM sequence: CGG
caagaccatactggctgaca

SEQ ID NO: 12986 - DNA, 20 bp, Artificial Sequence
  Description of Artificial Sequence: Synthetic oligonucleotide
  Target: ANGPTL4; (+) strand; PAM type: NRG; PAM sequence: TAG
ctactaaaaatacaaaaaat

SEQ ID NO: 12987 - DNA, 20 bp, Artificial Sequence
  Description of Artificial Sequence: Synthetic oligonucleotide
  Target: ANGPTL4; (+) strand; PAM type: NRG; PAM sequence: CAG
taaaaatacaaaaaattagc

SEQ ID NO: 12988 - DNA, 20 bp, Artificial Sequence
  Description of Artificial Sequence: Synthetic oligonucleotide
  Target: ANGPTL4; (+) strand; PAM type: NRG; PAM sequence: AGG
aaaaatacaaaaaattagcc

SEQ ID NO: 12989 - DNA, 20 bp, Artificial Sequence
  Description of Artificial Sequence: Synthetic oligonucleotide
  Target: ANGPTL4; (+) strand; PAM type: NRG; PAM sequence: TGG
tacaaaaaattagccaggca

SEQ ID NO: 12990 - DNA, 20 bp, Artificial Sequence
  Description of Artificial Sequence: Synthetic oligonucleotide
  Target: ANGPTL4; (+) strand; PAM type: NRG; PAM sequence: TGG
aaaaaattagccaggcatgg

SEQ ID NO: 12991 - DNA, 20 bp, Artificial Sequence
  Description of Artificial Sequence: Synthetic oligonucleotide
  Target: ANGPTL4; (+) strand; PAM type: NRG; PAM sequence: TAG
ggcatggtggcacatgcccg

SEQ ID NO: 12992 - DNA, 20 bp, Artificial Sequence
  Description of Artificial Sequence: Synthetic oligonucleotide
  Target: ANGPTL4; (+) strand; PAM type: NRG; PAM sequence: CAG
gtggcacatgcccgtagtcc

SEQ ID NO: 12993 - DNA, 20 bp, Artificial Sequence
  Description of Artificial Sequence: Synthetic oligonucleotide
  Target: ANGPTL4; (+) strand; PAM type: NRG; PAM sequence: CGG
tgcccgtagtcccagctatt

SEQ ID NO: 12994 - DNA, 20 bp, Artificial Sequence
  Description of Artificial Sequence: Synthetic oligonucleotide
  Target: ANGPTL4; (+) strand; PAM type: NRG; PAM sequence: GGG
gcccgtagtcccagctattc

SEQ ID NO: 12995 - DNA, 20 bp, Artificial Sequence
  Description of Artificial Sequence: Synthetic oligonucleotide
  Target: ANGPTL4; (+) strand; PAM type: NRG; PAM sequence: GAG
ccgtagtcccagctattcgg

SEQ ID NO: 12996 - DNA, 20 bp, Artificial Sequence
  Description of Artificial Sequence: Synthetic oligonucleotide
  Target: ANGPTL4; (+) strand; PAM type: NRG; PAM sequence: AGG
cgtagtcccagctattcggg

SEQ ID NO: 12997 - DNA, 20 bp, Artificial Sequence
  Description of Artificial Sequence: Synthetic oligonucleotide
  Target: ANGPTL4; (+) strand; PAM type: NRG; PAM sequence: AAG
tcccagctattcgggaggct

SEQ ID NO: 12998 - DNA, 20 bp, Artificial Sequence
  Description of Artificial Sequence: Synthetic oligonucleotide
  Target: ANGPTL4; (+) strand; PAM type: NRG; PAM sequence: AGG
cccagctattcgggaggcta

SEQ ID NO: 12999 - DNA, 20 bp, Artificial Sequence
  Description of Artificial Sequence: Synthetic oligonucleotide
  Target: ANGPTL4; (+) strand; PAM type: NRG; PAM sequence: CAG
agctattcgggaggctaagg

SEQ ID NO: 13000 - DNA, 20 bp, Artificial Sequence
  Description of Artificial Sequence: Synthetic oligonucleotide
  Target: ANGPTL4; (+) strand; PAM type: NRG; PAM sequence: AGG
gctattcgggaggctaaggc

SEQ ID NO: 13001 - DNA, 20 bp, Artificial Sequence
  Description of Artificial Sequence: Synthetic oligonucleotide
  Target: ANGPTL4; (+) strand; PAM type: NRG; PAM sequence: GAG
tattcgggaggctaaggcag

SEQ ID NO: 13002 - DNA, 20 bp, Artificial Sequence
  Description of Artificial Sequence: Synthetic oligonucleotide
  Target: ANGPTL4; (+) strand; PAM type: NRG; PAM sequence: TGG
gcaggagaatcacttgaacc

SEQ ID NO: 13003 - DNA, 20 bp, Artificial Sequence
  Description of Artificial Sequence: Synthetic oligonucleotide
  Target: ANGPTL4; (+) strand; PAM type: NRG; PAM sequence: GGG
caggagaatcacttgaacct

SEQ ID NO: 13004 - DNA, 20 bp, Artificial Sequence
  Description of Artificial Sequence: Synthetic oligonucleotide
  Target: ANGPTL4; (+) strand; PAM type: NRG; PAM sequence: GAG
ggagaatcacttgaacctgg

SEQ ID NO: 13005 - DNA, 20 bp, Artificial Sequence
  Description of Artificial Sequence: Synthetic oligonucleotide
  Target: ANGPTL4; (+) strand; PAM type: NRG; PAM sequence: AGG
gagaatcacttgaacctggg

SEQ ID NO: 13006 - DNA, 20 bp, Artificial Sequence
  Description of Artificial Sequence: Synthetic oligonucleotide
  Target: ANGPTL4; (+) strand; PAM type: NRG; PAM sequence: CGG
aatcacttgaacctgggagg

SEQ ID NO: 13007 - DNA, 20 bp, Artificial Sequence
  Description of Artificial Sequence: Synthetic oligonucleotide
  Target: ANGPTL4; (+) strand; PAM type: NRG; PAM sequence: GAG
tcacttgaacctgggaggcg

SEQ ID NO: 13008 - DNA, 20 bp, Artificial Sequence
  Description of Artificial Sequence: Synthetic oligonucleotide
  Target: ANGPTL4; (+) strand; PAM type: NRG; PAM sequence: AGG
cacttgaacctgggaggcgg

SEQ ID NO: 13009 - DNA, 20 bp, Artificial Sequence
  Description of Artificial Sequence: Synthetic oligonucleotide
  Target: ANGPTL4; (+) strand; PAM type: NRG; PAM sequence: CAG
aacctgggaggcggaggttg

SEQ ID NO: 13010 - DNA, 20 bp, Artificial Sequence
  Description of Artificial Sequence: Synthetic oligonucleotide
  Target: ANGPTL4; (+) strand; PAM type: NRG; PAM sequence: GAG
tgggaggcggaggttgcagt

SEQ ID NO: 13011 - DNA, 20 bp, Artificial Sequence
  Description of Artificial Sequence: Synthetic oligonucleotide
  Target: ANGPTL4; (+) strand; PAM type: NRG; PAM sequence: GAG
ggcggaggttgcagtgagct

SEQ ID NO: 13012 - DNA, 20 bp, Artificial Sequence
  Description of Artificial Sequence: Synthetic oligonucleotide
  Target: ANGPTL4; (+) strand; PAM type: NRG; PAM sequence: CAG
gagattgcaccactgcactc

SEQ ID NO: 13013 - DNA, 20 bp, Artificial Sequence
  Description of Artificial Sequence: Synthetic oligonucleotide
  Target: ANGPTL4; (+) strand; PAM type: NRG; PAM sequence: TGG
tgcaccactgcactccagcc

SEQ ID NO: 13014 - DNA, 20 bp, Artificial Sequence
  Description of Artificial Sequence: Synthetic oligonucleotide
  Target: ANGPTL4; (+) strand; PAM type: NRG; PAM sequence: GGG
gcaccactgcactccagcct

SEQ ID NO: 13015 - DNA, 20 bp, Artificial Sequence
  Description of Artificial Sequence: Synthetic oligonucleotide
  Target: ANGPTL4; (+) strand; PAM type: NRG; PAM sequence: CAG
ctgcactccagcctgggtga

SEQ ID NO: 13016 - DNA, 20 bp, Artificial Sequence
  Description of Artificial Sequence: Synthetic oligonucleotide
  Target: ANGPTL4; (+) strand; PAM type: NRG; PAM sequence: GAG
gcactccagcctgggtgaca

SEQ ID NO: 13017 - DNA, 20 bp, Artificial Sequence
  Description of Artificial Sequence: Synthetic oligonucleotide
  Target: ANGPTL4; (+) strand; PAM type: NRG; PAM sequence: AAG
tccagcctgggtgacagagc

SEQ ID NO: 13018 - DNA, 20 bp, Artificial Sequence
  Description of Artificial Sequence: Synthetic oligonucleotide
  Target: ANGPTL4; (+) strand; PAM type: NRG; PAM sequence: AAG
agcaagactctgtctcaaaa

SEQ ID NO: 13019 - DNA, 20 bp, Artificial Sequence
  Description of Artificial Sequence: Synthetic oligonucleotide
  Target: ANGPTL4; (+) strand; PAM type: NRG; PAM sequence: AAG
agactctgtctcaaaaaaga

SEQ ID NO: 13020 - DNA, 20 bp, Artificial Sequence
  Description of Artificial Sequence: Synthetic oligonucleotide
  Target: ANGPTL4; (+) strand; PAM type: NRG; PAM sequence: AAG
tctcaaaaaagaaagaaaaa

SEQ ID NO: 13021 - DNA, 20 bp, Artificial Sequence
  Description of Artificial Sequence: Synthetic oligonucleotide
  Target: ANGPTL4; (+) strand; PAM type: NRG; PAM sequence: AAG
aaaaaagaaagaaaaaaaga

SEQ ID NO: 13022 - DNA, 20 bp, Artificial Sequence
  Description of Artificial Sequence: Synthetic oligonucleotide
  Target: ANGPTL4; (+) strand; PAM type: NRG; PAM sequence: AAG
agaaagaaaaaaagaaagaa

SEQ ID NO: 13023 - DNA, 20 bp, Artificial Sequence
  Description of Artificial Sequence: Synthetic oligonucleotide
  Target: ANGPTL4; (+) strand; PAM type: NRG; PAM sequence: TGG
gaaagaaaagaaaaacacca

SEQ ID NO: 13024 - DNA, 20 bp, Artificial Sequence
  Description of Artificial Sequence: Synthetic oligonucleotide
  Target: ANGPTL4; (+) strand; PAM type: NRG; PAM sequence: CAG
agaaaagaaaaacaccatgg

SEQ ID NO: 13025 - DNA, 20 bp, Artificial Sequence
  Description of Artificial Sequence: Synthetic oligonucleotide
  Target: ANGPTL4; (+) strand; PAM type: NRG; PAM sequence: AGG
gaaaagaaaaacaccatggc

SEQ ID NO: 13026 - DNA, 20 bp, Artificial Sequence
  Description of Artificial Sequence: Synthetic oligonucleotide
  Target: ANGPTL4; (+) strand; PAM type: NRG; PAM sequence: AAG
caccatggcaggaaactaac

SEQ ID NO: 13027 - DNA, 20 bp, Artificial Sequence
  Description of Artificial Sequence: Synthetic oligonucleotide
  Target: ANGPTL4; (+) strand; PAM type: NRG; PAM sequence: AGG
accatggcaggaaactaaca

SEQ ID NO: 13028 - DNA, 20 bp, Artificial Sequence
  Description of Artificial Sequence: Synthetic oligonucleotide
  Target: ANGPTL4; (+) strand; PAM type: NRG; PAM sequence: GGG
ccatggcaggaaactaacaa

SEQ ID NO: 13029 - DNA, 20 bp, Artificial Sequence
  Description of Artificial Sequence: Synthetic oligonucleotide
  Target: ANGPTL4; (+) strand; PAM type: NRG; PAM sequence: GGG
catggcaggaaactaacaag

SEQ ID NO: 13030 - DNA, 20 bp, Artificial Sequence
  Description of Artificial Sequence: Synthetic oligonucleotide
  Target: ANGPTL4; (+) strand; PAM type: NRG; PAM sequence: CAG
gcaggaaactaacaaggggc

SEQ ID NO: 13031 - DNA, 20 bp, Artificial Sequence
  Description of Artificial Sequence: Synthetic oligonucleotide
  Target: ANGPTL4; (+) strand; PAM type: NRG; PAM sequence: AGG
caggaaactaacaaggggcc

SEQ ID NO: 13032 - DNA, 20 bp, Artificial Sequence
  Description of Artificial Sequence: Synthetic oligonucleotide
  Target: ANGPTL4; (+) strand; PAM type: NRG; PAM sequence: AAG
gaaactaacaaggggccagg

SEQ ID NO: 13033 - DNA, 20 bp, Artificial Sequence
  Description of Artificial Sequence: Synthetic oligonucleotide
  Target: ANGPTL4; (+) strand; PAM type: NRG; PAM sequence: TGG
ctaacaaggggccaggaagc

SEQ ID NO: 13034 - DNA, 20 bp, Artificial Sequence
  Description of Artificial Sequence: Synthetic oligonucleotide
  Target: ANGPTL4; (+) strand; PAM type: NRG; PAM sequence: GGG
taacaaggggccaggaagct

SEQ ID NO: 13035 - DNA, 20 bp, Artificial Sequence
  Description of Artificial Sequence: Synthetic oligonucleotide
  Target: ANGPTL4; (+) strand; PAM type: NRG; PAM sequence: TGG
aggaagctgggatgtgaacc

SEQ ID NO: 13036 - DNA, 20 bp, Artificial Sequence
  Description of Artificial Sequence: Synthetic oligonucleotide
  Target: ANGPTL4; (+) strand; PAM type: NRG; PAM sequence: CAG
aacctggacctgttaaactc

SEQ ID NO: 13037 - DNA, 20 bp, Artificial Sequence
  Description of Artificial Sequence: Synthetic oligonucleotide
  Target: ANGPTL4; (+) strand; PAM type: NRG; PAM sequence: GAG
cctggacctgttaaactcca

SEQ ID NO: 13038 - DNA, 20 bp, Artificial Sequence
  Description of Artificial Sequence: Synthetic oligonucleotide
  Target: ANGPTL4; (+) strand; PAM type: NRG; PAM sequence: CAG
cctgttaaactccagagctg

SEQ ID NO: 13039 - DNA, 20 bp, Artificial Sequence
  Description of Artificial Sequence: Synthetic oligonucleotide
  Target: ANGPTL4; (+) strand; PAM type: NRG; PAM sequence: TGG
tgtaaatcacatccctctcc

SEQ ID NO: 13040 - DNA, 20 bp, Artificial Sequence
  Description of Artificial Sequence: Synthetic oligonucleotide
  Target: ANGPTL4; (+) strand; PAM type: NRG; PAM sequence: CAG
cacatccctctcctggacca

SEQ ID NO: 13041 - DNA, 20 bp, Artificial Sequence
  Description of Artificial Sequence: Synthetic oligonucleotide
  Target: ANGPTL4; (+) strand; PAM type: NRG; PAM sequence: AGG
acatccctctcctggaccac

SEQ ID NO: 13042 - DNA, 20 bp, Artificial Sequence
  Description of Artificial Sequence: Synthetic oligonucleotide
  Target: ANGPTL4; (+) strand; PAM type: NRG; PAM sequence: GAG
atccctctcctggaccacag

SEQ ID NO: 13043 - DNA, 20 bp, Artificial Sequence
  Description of Artificial Sequence: Synthetic oligonucleotide
  Target: ANGPTL4; (+) strand; PAM type: NRG; PAM sequence: TGG
cctggaccacaggagctcac

SEQ ID NO: 13044 - DNA, 20 bp, Artificial Sequence
  Description of Artificial Sequence: Synthetic oligonucleotide
  Target: ANGPTL4; (+) strand; PAM type: NRG; PAM sequence: CAG
ccacaggagctcactggccc

SEQ ID NO: 13045 - DNA, 20 bp, Artificial Sequence
  Description of Artificial Sequence: Synthetic oligonucleotide
  Target: ANGPTL4; (+) strand; PAM type: NRG; PAM sequence: TGG
ctggccccagttcctgcatt

SEQ ID NO: 13046 - DNA, 20 bp, Artificial Sequence
  Description of Artificial Sequence: Synthetic oligonucleotide
  Target: ANGPTL4; (+) strand; PAM type: NRG; PAM sequence: TGG
cagttcctgcatttggaaaa

SEQ ID NO: 13047 - DNA, 20 bp, Artificial Sequence
  Description of Artificial Sequence: Synthetic oligonucleotide
  Target: ANGPTL4; (+) strand; PAM type: NRG; PAM sequence: GGG
agttcctgcatttggaaaat

SEQ ID NO: 13048 - DNA, 20 bp, Artificial Sequence
  Description of Artificial Sequence: Synthetic oligonucleotide
  Target: ANGPTL4; (+) strand; PAM type: NRG; PAM sequence: GGG
gttcctgcatttggaaaatg

SEQ ID NO: 13049 - DNA, 20 bp, Artificial Sequence
  Description of Artificial Sequence: Synthetic oligonucleotide
  Target: ANGPTL4; (+) strand; PAM type: NRG; PAM sequence: TGG
ctgcatttggaaaatgggga

SEQ ID NO: 13050 - DNA, 20 bp, Artificial Sequence
  Description of Artificial Sequence: Synthetic oligonucleotide
  Target: ANGPTL4; (+) strand; PAM type: NRG; PAM sequence: TGG
tccatgccaccatcccttcc

SEQ ID NO: 13051 - DNA, 20 bp, Artificial Sequence
  Description of Artificial Sequence: Synthetic oligonucleotide
  Target: ANGPTL4; (+) strand; PAM type: NRG; PAM sequence: TGG
accatcccttcctggcctca

SEQ ID NO: 13052 - DNA, 20 bp, Artificial Sequence
  Description of Artificial Sequence: Synthetic oligonucleotide
  Target: ANGPTL4; (+) strand; PAM type: NRG; PAM sequence: TGG
cccttcctggcctcatggtg

SEQ ID NO: 13053 - DNA, 20 bp, Artificial Sequence
  Description of Artificial Sequence: Synthetic oligonucleotide
  Target: ANGPTL4; (+) strand; PAM type: NRG; PAM sequence: GGG
ccttcctggcctcatggtgt

SEQ ID NO: 13054 - DNA, 20 bp, Artificial Sequence
  Description of Artificial Sequence: Synthetic oligonucleotide
  Target: ANGPTL4; (+) strand; PAM type: NRG; PAM sequence: GGG
cttcctggcctcatggtgtg

SEQ ID NO: 13055 - DNA, 20 bp, Artificial Sequence
  Description of Artificial Sequence: Synthetic oligonucleotide
  Target: ANGPTL4; (+) strand; PAM type: NRG; PAM sequence: GAG
tcctggcctcatggtgtggg

SEQ ID NO: 13056 - DNA, 20 bp, Artificial Sequence
  Description of Artificial Sequence: Synthetic oligonucleotide
  Target: ANGPTL4; (+) strand; PAM type: NRG; PAM sequence: AGG
cctggcctcatggtgtgggg

SEQ ID NO: 13057 - DNA, 20 bp, Artificial Sequence
  Description of Artificial Sequence: Synthetic oligonucleotide
  Target: ANGPTL4; (+) strand; PAM type: NRG; PAM sequence: GGG
ctggcctcatggtgtgggga

SEQ ID NO: 13058 - DNA, 20 bp, Artificial Sequence
  Description of Artificial Sequence: Synthetic oligonucleotide
  Target: ANGPTL4; (+) strand; PAM type: NRG; PAM sequence: GGG
tggcctcatggtgtggggag

SEQ ID NO: 13059 - DNA, 20 bp, Artificial Sequence
  Description of Artificial Sequence: Synthetic oligonucleotide
  Target: ANGPTL4; (+) strand; PAM type: NRG; PAM sequence: GGG
ggcctcatggtgtggggagg

SEQ ID NO: 13060 - DNA, 20 bp, Artificial Sequence
  Description of Artificial Sequence: Synthetic oligonucleotide
  Target: ANGPTL4; (+) strand; PAM type: NRG; PAM sequence: TGG
ctcatggtgtggggaggggg

SEQ ID NO: 13061 - DNA, 20 bp, Artificial Sequence
  Description of Artificial Sequence: Synthetic oligonucleotide
  Target: ANGPTL4; (+) strand; PAM type: NRG; PAM sequence: AAG
ggtgtggggagggggtggta

SEQ ID NO: 13062 - DNA, 20 bp, Artificial Sequence
  Description of Artificial Sequence: Synthetic oligonucleotide
  Target: ANGPTL4; (+) strand; PAM type: NRG; PAM sequence: AAG
gggggtggtaaagaattaat

SEQ ID NO: 13063 - DNA, 20 bp, Artificial Sequence
  Description of Artificial Sequence: Synthetic oligonucleotide
  Target: ANGPTL4; (+) strand; PAM type: NRG; PAM sequence: AGG
ggggtggtaaagaattaata

SEQ ID NO: 13064 - DNA, 20 bp, Artificial Sequence
  Description of Artificial Sequence: Synthetic oligonucleotide
  Target: ANGPTL4; (+) strand; PAM type: NRG; PAM sequence: CAG
taaggcattaatattcatca

SEQ ID NO: 13065 - DNA, 20 bp, Artificial Sequence
  Description of Artificial Sequence: Synthetic oligonucleotide
  Target: ANGPTL4; (+) strand; PAM type: NRG; PAM sequence: AGG
aaggcattaatattcatcac

SEQ ID NO: 13066 - DNA, 20 bp, Artificial Sequence
  Description of Artificial Sequence: Synthetic oligonucleotide
  Target: ANGPTL4; (+) strand; PAM type: NRG; PAM sequence: TGG
cattaatattcatcacaggc

SEQ ID NO: 13067 - DNA, 20 bp, Artificial Sequence
  Description of Artificial Sequence: Synthetic oligonucleotide
  Target: ANGPTL4; (+) strand; PAM type: NRG; PAM sequence: GGG
attaatattcatcacaggct

SEQ ID NO: 13068 - DNA, 20 bp, Artificial Sequence
  Description of Artificial Sequence: Synthetic oligonucleotide
  Target: ANGPTL4; (+) strand; PAM type: NRG; PAM sequence: CAG
tattcatcacaggctgggtc

SEQ ID NO: 13069 - DNA, 20 bp, Artificial Sequence
  Description of Artificial Sequence: Synthetic oligonucleotide
  Target: ANGPTL4; (+) strand; PAM type: NRG; PAM sequence: CAG
gtgcctcgcgactgtaatcc

SEQ ID NO: 13070 - DNA, 20 bp, Artificial Sequence
  Description of Artificial Sequence: Synthetic oligonucleotide
  Target: ANGPTL4; (+) strand; PAM type: NRG; PAM sequence: TGG
cgactgtaatcccagctctt

SEQ ID NO: 13071 - DNA, 20 bp, Artificial Sequence
  Description of Artificial Sequence: Synthetic oligonucleotide
  Target: ANGPTL4; (+) strand; PAM type: NRG; PAM sequence: GGG
gactgtaatcccagctcttt

SEQ ID NO: 13072 - DNA, 20 bp, Artificial Sequence
  Description of Artificial Sequence: Synthetic oligonucleotide
  Target: ANGPTL4; (+) strand; PAM type: NRG; PAM sequence: GAG
ctgtaatcccagctctttgg

SEQ ID NO: 13073 - DNA, 20 bp, Artificial Sequence
  Description of Artificial Sequence: Synthetic oligonucleotide
  Target: ANGPTL4; (+) strand; PAM type: NRG; PAM sequence: AGG
tgtaatcccagctctttggg

SEQ ID NO: 13074 - DNA, 20 bp, Artificial Sequence
  Description of Artificial Sequence: Synthetic oligonucleotide
  Target: ANGPTL4; (+) strand; PAM type: NRG; PAM sequence: GAG
tcccagctctttgggaggct

SEQ ID NO: 13075 - DNA, 20 bp, Artificial Sequence
  Description of Artificial Sequence: Synthetic oligonucleotide
  Target: ANGPTL4; (+) strand; PAM type: NRG; PAM sequence: AGG
cccagctctttgggaggctg

SEQ ID NO: 13076 - DNA, 20 bp, Artificial Sequence
  Description of Artificial Sequence: Synthetic oligonucleotide
  Target: ANGPTL4; (+) strand; PAM type: NRG; PAM sequence: TGG
gctctttgggaggctgaggc

SEQ ID NO: 13077 - DNA, 20 bp, Artificial Sequence
  Description of Artificial Sequence: Synthetic oligonucleotide
  Target: ANGPTL4; (+) strand; PAM type: NRG; PAM sequence: GAG
tctttgggaggctgaggctg

SEQ ID NO: 13078 - DNA, 20 bp, Artificial Sequence
  Description of Artificial Sequence: Synthetic oligonucleotide
  Target: ANGPTL4; (+) strand; PAM type: NRG; PAM sequence: AGG
ctttgggaggctgaggctgg

SEQ ID NO: 13079 - DNA, 20 bp, Artificial Sequence
  Description of Artificial Sequence: Synthetic oligonucleotide
  Target: ANGPTL4; (+) strand; PAM type: NRG; PAM sequence: TGG
aggctgaggctggaggacct

SEQ ID NO: 13080 - DNA, 20 bp, Artificial Sequence
  Description of Artificial Sequence: Synthetic oligonucleotide
  Target: ANGPTL4; (+) strand; PAM type: NRG; PAM sequence: GAG
gctgaggctggaggaccttg

SEQ ID NO: 13081 - DNA, 20 bp, Artificial Sequence
  Description of Artificial Sequence: Synthetic oligonucleotide
  Target: ANGPTL4; (+) strand; PAM type: NRG; PAM sequence: GAG
gctggaggaccttggagttt

SEQ ID NO: 13082 - DNA, 20 bp, Artificial Sequence
  Description of Artificial Sequence: Synthetic oligonucleotide
  Target: ANGPTL4; (+) strand; PAM type: NRG; PAM sequence: CAG
aggaccttggagtttgagac

SEQ ID NO: 13083 - DNA, 20 bp, Artificial Sequence
  Description of Artificial Sequence: Synthetic oligonucleotide
  Target: ANGPTL4; (+) strand; PAM type: NRG; PAM sequence: CAG
tgagaccagcctacgcaaca

SEQ ID NO: 13084 - DNA, 20 bp, Artificial Sequence
  Description of Artificial Sequence: Synthetic oligonucleotide
  Target: ANGPTL4; (+) strand; PAM type: NRG; PAM sequence: AAG
accagcctacgcaacacagc

SEQ ID NO: 13085 - DNA, 20 bp, Artificial Sequence
  Description of Artificial Sequence: Synthetic oligonucleotide
  Target: ANGPTL4; (+) strand; PAM type: NRG; PAM sequence: AAG
ctctacgataaatttttaaa

SEQ ID NO: 13086 - DNA, 20 bp, Artificial Sequence
  Description of Artificial Sequence: Synthetic oligonucleotide
  Target: ANGPTL4; (+) strand; PAM type: NRG; PAM sequence: CGG
cgataaatttttaaaaagtc

SEQ ID NO: 13087 - DNA, 20 bp, Artificial Sequence
  Description of Artificial Sequence: Synthetic oligonucleotide
  Target: ANGPTL4; (+) strand; PAM type: NRG; PAM sequence: GGG
gataaatttttaaaaagtcc

SEQ ID NO: 13088 - DNA, 20 bp, Artificial Sequence
  Description of Artificial Sequence: Synthetic oligonucleotide
  Target: ANGPTL4; (+) strand; PAM type: NRG; PAM sequence: CAG
atttttaaaaagtccgggtg

SEQ ID NO: 13089 - DNA, 20 bp, Artificial Sequence
  Description of Artificial Sequence: Synthetic oligonucleotide
  Target: ANGPTL4; (+) strand; PAM type: NRG; PAM sequence: TGG
tttaaaaagtccgggtgcag

SEQ ID NO: 13090 - DNA, 20 bp, Artificial Sequence
  Description of Artificial Sequence: Synthetic oligonucleotide
  Target: ANGPTL4; (+) strand; PAM type: NRG; PAM sequence: CAG
gtggctcatgcctataatcc

SEQ ID NO: 13091 - DNA, 20 bp, Artificial Sequence
  Description of Artificial Sequence: Synthetic oligonucleotide
  Target: ANGPTL4; (+) strand; PAM type: NRG; PAM sequence: TGG
tgcctataatcccagcactt

SEQ ID NO: 13092 - DNA, 20 bp, Artificial Sequence
  Description of Artificial Sequence: Synthetic oligonucleotide
  Target: ANGPTL4; (+) strand; PAM type: NRG; PAM sequence: GGG
gcctataatcccagcacttt

SEQ ID NO: 13093 - DNA, 20 bp, Artificial Sequence
  Description of Artificial Sequence: Synthetic oligonucleotide
  Target: ANGPTL4; (+) strand; PAM type: NRG; PAM sequence: GAG
ctataatcccagcactttgg

SEQ ID NO: 13094 - DNA, 20 bp, Artificial Sequence
  Description of Artificial Sequence: Synthetic oligonucleotide
  Target: ANGPTL4; (+) strand; PAM type: NRG; PAM sequence: AGG
tataatcccagcactttggg

SEQ ID NO: 13095 - DNA, 20 bp, Artificial Sequence
  Description of Artificial Sequence: Synthetic oligonucleotide
  Target: ANGPTL4; (+) strand; PAM type: NRG; PAM sequence: AAG
tcccagcactttgggaggcc

SEQ ID NO: 13096 - DNA, 20 bp, Artificial Sequence
  Description of Artificial Sequence: Synthetic oligonucleotide
  Target: ANGPTL4; (+) strand; PAM type: NRG; PAM sequence: AGG
cccagcactttgggaggcca

SEQ ID NO: 13097 - DNA, 20 bp, Artificial Sequence
  Description of Artificial Sequence: Synthetic oligonucleotide
  Target: ANGPTL4; (+) strand; PAM type: NRG; PAM sequence: CGG
agcactttgggaggccaagg

SEQ ID NO: 13098 - DNA, 20 bp, Artificial Sequence
  Description of Artificial Sequence: Synthetic oligonucleotide
  Target: ANGPTL4; (+) strand; PAM type: NRG; PAM sequence: GGG
gcactttgggaggccaaggc

SEQ ID NO: 13099 - DNA, 20 bp, Artificial Sequence
  Description of Artificial Sequence: Synthetic oligonucleotide
  Target: ANGPTL4; (+) strand; PAM type: NRG; PAM sequence: TGG
ctttgggaggccaaggcggg

SEQ ID NO: 13100 - DNA, 20 bp, Artificial Sequence
  Description of Artificial Sequence: Synthetic oligonucleotide
  Target: ANGPTL4; (+) strand; PAM type: NRG; PAM sequence: GAG
ggccaaggcgggtggatcat

SEQ ID NO: 13101 - DNA, 20 bp, Artificial Sequence
  Description of Artificial Sequence: Synthetic oligonucleotide
  Target: ANGPTL4; (+) strand; PAM type: NRG; PAM sequence: AGG
gccaaggcgggtggatcatg

SEQ ID NO: 13102 - DNA, 20 bp, Artificial Sequence
  Description of Artificial Sequence: Synthetic oligonucleotide
  Target: ANGPTL4; (+) strand; PAM type: NRG; PAM sequence: TAG
aggcgggtggatcatgaggt

SEQ ID NO: 13103 - DNA, 20 bp, Artificial Sequence
  Description of Artificial Sequence: Synthetic oligonucleotide
  Target: ANGPTL4; (+) strand; PAM type: NRG; PAM sequence: AGG
ggcgggtggatcatgaggtt

SEQ ID NO: 13104 - DNA, 20 bp, Artificial Sequence
  Description of Artificial Sequence: Synthetic oligonucleotide
  Target: ANGPTL4; (+) strand; PAM type: NRG; PAM sequence: GAG
cgggtggatcatgaggttag

SEQ ID NO: 13105 - DNA, 20 bp, Artificial Sequence
  Description of Artificial Sequence: Synthetic oligonucleotide
  Target: ANGPTL4; (+) strand; PAM type: NRG; PAM sequence: AAG
gatcatgaggttaggagttc

SEQ ID NO: 13106 - DNA, 20 bp, Artificial Sequence
  Description of Artificial Sequence: Synthetic oligonucleotide
  Target: ANGPTL4; (+) strand; PAM type: NRG; PAM sequence: CAG
tgaggttaggagttcaagac

SEQ ID NO: 13107 - DNA, 20 bp, Artificial Sequence
  Description of Artificial Sequence: Synthetic oligonucleotide
  Target: ANGPTL4; (+) strand; PAM type: NRG; PAM sequence: TGG
ttaggagttcaagaccagcc

SEQ ID NO: 13108 - DNA, 20 bp, Artificial Sequence
  Description of Artificial Sequence: Synthetic oligonucleotide
  Target: ANGPTL4; (+) strand; PAM type: NRG; PAM sequence: AAG
agttcaagaccagcctggcc

SEQ ID NO: 13109 - DNA, 20 bp, Artificial Sequence
  Description of Artificial Sequence: Synthetic oligonucleotide
  Target: ANGPTL4; (+) strand; PAM type: NRG; PAM sequence: TAG
caagaccagcctggccaaga

SEQ ID NO: 13110 - DNA, 20 bp, Artificial Sequence
  Description of Artificial Sequence: Synthetic oligonucleotide
  Target: ANGPTL4; (+) strand; PAM type: NRG; PAM sequence: TAG
tactaaaaatacaaaaaaat

SEQ ID NO: 13111 - DNA, 20 bp, Artificial Sequence
  Description of Artificial Sequence: Synthetic oligonucleotide
  Target: ANGPTL4; (+) strand; PAM type: NRG; PAM sequence: CAG
aaaaatacaaaaaaattagc

SEQ ID NO: 13112 - DNA, 20 bp, Artificial Sequence
  Description of Artificial Sequence: Synthetic oligonucleotide
  Target: ANGPTL4; (+) strand; PAM type: NRG; PAM sequence: AGG
aaaatacaaaaaaattagcc

SEQ ID NO: 13113 - DNA, 20 bp, Artificial Sequence
  Description of Artificial Sequence: Synthetic oligonucleotide
  Target: ANGPTL4; (+) strand; PAM type: NRG; PAM sequence: TGG
acaaaaaaattagccaggtg

SEQ ID NO: 13114 - DNA, 20 bp, Artificial Sequence
  Description of Artificial Sequence: Synthetic oligonucleotide
  Target: ANGPTL4; (+) strand; PAM type: NRG; PAM sequence: TGG
aaaaaattagccaggtgtgg

SEQ ID NO: 13115 - DNA, 20 bp, Artificial Sequence
  Description of Artificial Sequence: Synthetic oligonucleotide
  Target: ANGPTL4; (+) strand; PAM type: NRG; PAM sequence: TGG
aaattagccaggtgtggtgg

SEQ ID NO: 13116 - DNA, 20 bp, Artificial Sequence
  Description of Artificial Sequence: Synthetic oligonucleotide
  Target: ANGPTL4; (+) strand; PAM type: NRG; PAM sequence: GGG
aattagccaggtgtggtggt

SEQ ID NO: 13117 - DNA, 20 bp, Artificial Sequence
  Description of Artificial Sequence: Synthetic oligonucleotide
  Target: ANGPTL4; (+) strand; PAM type: NRG; PAM sequence: CAG
gtggtgggcgcctgtaatcc

SEQ ID NO: 13118 - DNA, 20 bp, Artificial Sequence
  Description of Artificial Sequence: Synthetic oligonucleotide
  Target: ANGPTL4; (+) strand; PAM type: NRG; PAM sequence: GAG
gcctgtaatcccagctactt

SEQ ID NO: 13119 - DNA, 20 bp, Artificial Sequence
  Description of Artificial Sequence: Synthetic oligonucleotide
  Target: ANGPTL4; (+) strand; PAM type: NRG; PAM sequence: GAG
ctgtaatcccagctacttga

SEQ ID NO: 13120 - DNA, 20 bp, Artificial Sequence
  Description of Artificial Sequence: Synthetic oligonucleotide
  Target: ANGPTL4; (+) strand; PAM type: NRG; PAM sequence: AGG
tgtaatcccagctacttgag

SEQ ID NO: 13121 - DNA, 20 bp, Artificial Sequence
  Description of Artificial Sequence: Synthetic oligonucleotide
  Target: ANGPTL4; (+) strand; PAM type: NRG; PAM sequence: AAG
tcccagctacttgagaggct

SEQ ID NO: 13122 - DNA, 20 bp, Artificial Sequence
  Description of Artificial Sequence: Synthetic oligonucleotide
  Target: ANGPTL4; (+) strand; PAM type: NRG; PAM sequence: AGG
cccagctacttgagaggcta

SEQ ID NO: 13123 - DNA, 20 bp, Artificial Sequence
  Description of Artificial Sequence: Synthetic oligonucleotide
  Target: ANGPTL4; (+) strand; PAM type: NRG; PAM sequence: CAG
agctacttgagaggctaagg

SEQ ID NO: 13124 - DNA, 20 bp, Artificial Sequence
  Description of Artificial Sequence: Synthetic oligonucleotide
  Target: ANGPTL4; (+) strand; PAM type: NRG; PAM sequence: GAG
ctacttgagaggctaaggca

SEQ ID NO: 13125 - DNA, 20 bp, Artificial Sequence
  Description of Artificial Sequence: Synthetic oligonucleotide
  Target: ANGPTL4; (+) strand; PAM type: NRG; PAM sequence: TGG
ggctaaggcagagaattgct

SEQ ID NO: 13126 - DNA, 20 bp, Artificial Sequence
  Description of Artificial Sequence: Synthetic oligonucleotide
  Target: ANGPTL4; (+) strand; PAM type: NRG; PAM sequence: CGG
ggcagagaattgcttggact

SEQ ID NO: 13127 - DNA, 20 bp, Artificial Sequence
  Description of Artificial Sequence: Synthetic oligonucleotide
  Target: ANGPTL4; (+) strand; PAM type: NRG; PAM sequence: GGG
gcagagaattgcttggactc

SEQ ID NO: 13128 - DNA, 20 bp, Artificial Sequence
  Description of Artificial Sequence: Synthetic oligonucleotide
  Target: ANGPTL4; (+) strand; PAM type: NRG; PAM sequence: GAG
agagaattgcttggactcgg

SEQ ID NO: 13129 - DNA, 20 bp, Artificial Sequence
  Description of Artificial Sequence: Synthetic oligonucleotide
  Target: ANGPTL4; (+) strand; PAM type: NRG; PAM sequence: AGG
gagaattgcttggactcggg

SEQ ID NO: 13130 - DNA, 20 bp, Artificial Sequence
  Description of Artificial Sequence: Synthetic oligonucleotide
  Target: ANGPTL4; (+) strand; PAM type: NRG; PAM sequence: CAG
aattgcttggactcgggagg

SEQ ID NO: 13131 - DNA, 20 bp, Artificial Sequence
  Description of Artificial Sequence: Synthetic oligonucleotide
  Target: ANGPTL4; (+) strand; PAM type: NRG; PAM sequence: GAG
ttgcttggactcgggaggca

SEQ ID NO: 13132 - DNA, 20 bp, Artificial Sequence
  Description of Artificial Sequence: Synthetic oligonucleotide
  Target: ANGPTL4; (+) strand; PAM type: NRG; PAM sequence: AGG
tgcttggactcgggaggcag

SEQ ID NO: 13133 - DNA, 20 bp, Artificial Sequence
  Description of Artificial Sequence: Synthetic oligonucleotide
  Target: ANGPTL4; (+) strand; PAM type: NRG; PAM sequence: GGG
gcttggactcgggaggcaga

SEQ ID NO: 13134 - DNA, 20 bp, Artificial Sequence
  Description of Artificial Sequence: Synthetic oligonucleotide
  Target: ANGPTL4; (+) strand; PAM type: NRG; PAM sequence: CAG
gactcgggaggcagagggtg

SEQ ID NO: 13135 - DNA, 20 bp, Artificial Sequence
  Description of Artificial Sequence: Synthetic oligonucleotide
  Target: ANGPTL4; (+) strand; PAM type: NRG; PAM sequence: GAG
cgggaggcagagggtgcagt

SEQ ID NO: 13136 - DNA, 20 bp, Artificial Sequence
  Description of Artificial Sequence: Synthetic oligonucleotide
  Target: ANGPTL4; (+) strand; PAM type: NRG; PAM sequence: GAG
ggcagagggtgcagtgagcc

SEQ ID NO: 13137 - DNA, 20 bp, Artificial Sequence
  Description of Artificial Sequence: Synthetic oligonucleotide
  Target: ANGPTL4; (+) strand; PAM type: NRG; PAM sequence: CAG
gagatcatgccactgcactc

SEQ ID NO: 13138 - DNA, 20 bp, Artificial Sequence
  Description of Artificial Sequence: Synthetic oligonucleotide
  Target: ANGPTL4; (+) strand; PAM type: NRG; PAM sequence: TGG
catgccactgcactccagcc

SEQ ID NO: 13139 - DNA, 20 bp, Artificial Sequence
  Description of Artificial Sequence: Synthetic oligonucleotide
  Target: ANGPTL4; (+) strand; PAM type: NRG; PAM sequence: GGG
atgccactgcactccagcct

SEQ ID NO: 13140 - DNA, 20 bp, Artificial Sequence
  Description of Artificial Sequence: Synthetic oligonucleotide
  Target: ANGPTL4; (+) strand; PAM type: NRG; PAM sequence: CAG
ctgcactccagcctgggcaa

SEQ ID NO: 13141 - DNA, 20 bp, Artificial Sequence
  Description of Artificial Sequence: Synthetic oligonucleotide
  Target: ANGPTL4; (+) strand; PAM type: NRG; PAM sequence: GAG
gcactccagcctgggcaaca

SEQ ID NO: 13142 - DNA, 20 bp, Artificial Sequence
  Description of Artificial Sequence: Synthetic oligonucleotide
  Target: ANGPTL4; (+) strand; PAM type: NRG; PAM sequence: GAG
tccagcctgggcaacagagt

SEQ ID NO: 13143 - DNA, 20 bp, Artificial Sequence
  Description of Artificial Sequence: Synthetic oligonucleotide
  Target: ANGPTL4; (+) strand; PAM type: NRG; PAM sequence: AAG
ctgcctcaaaaaaaaaaaaa

SEQ ID NO: 13144 - DNA, 20 bp, Artificial Sequence
  Description of Artificial Sequence: Synthetic oligonucleotide
  Target: ANGPTL4; (+) strand; PAM type: NRG; PAM sequence: AAG
aaaaaaaaaaaaaaagaatc

SEQ ID NO: 13145 - DNA, 20 bp, Artificial Sequence
  Description of Artificial Sequence: Synthetic oligonucleotide
  Target: ANGPTL4; (+) strand; PAM type: NRG; PAM sequence: GAG
aaaaaaaaaaaaagaatcaa

SEQ ID NO: 13146 - DNA, 20 bp, Artificial Sequence
  Description of Artificial Sequence: Synthetic oligonucleotide
  Target: ANGPTL4; (+) strand; PAM type: NRG; PAM sequence: CAG
aaaagaatcaagagaaattt

SEQ ID NO: 13147 - DNA, 20 bp, Artificial Sequence
  Description of Artificial Sequence: Synthetic oligonucleotide
  Target: ANGPTL4; (+) strand; PAM type: NRG; PAM sequence: GAG
aagaatcaagagaaatttca

SEQ ID NO: 13148 - DNA, 20 bp, Artificial Sequence
  Description of Artificial Sequence: Synthetic oligonucleotide
  Target: ANGPTL4; (+) strand; PAM type: NRG; PAM sequence: AGG
agaatcaagagaaatttcag

SEQ ID NO: 13149 - DNA, 20 bp, Artificial Sequence
  Description of Artificial Sequence: Synthetic oligonucleotide
  Target: ANGPTL4; (+) strand; PAM type: NRG; PAM sequence: GGG
gaatcaagagaaatttcaga

SEQ ID NO: 13150 - DNA, 20 bp, Artificial Sequence
  Description of Artificial Sequence: Synthetic oligonucleotide
  Target: ANGPTL4; (+) strand; PAM type: NRG; PAM sequence: GAG
atcaagagaaatttcagagg

SEQ ID NO: 13151 - DNA, 20 bp, Artificial Sequence
  Description of Artificial Sequence: Synthetic oligonucleotide
  Target: ANGPTL4; (+) strand; PAM type: NRG; PAM sequence: AGG
tcaagagaaatttcagaggg

SEQ ID NO: 13152 - DNA, 20 bp, Artificial Sequence
  Description of Artificial Sequence: Synthetic oligonucleotide
  Target: ANGPTL4; (+) strand; PAM type: NRG; PAM sequence: GAG
aagagaaatttcagagggag

SEQ ID NO: 13153 - DNA, 20 bp, Artificial Sequence
  Description of Artificial Sequence: Synthetic oligonucleotide
  Target: ANGPTL4; (+) strand; PAM type: NRG; PAM sequence: GAG
gagaaatttcagagggagga

SEQ ID NO: 13154 - DNA, 20 bp, Artificial Sequence
  Description of Artificial Sequence: Synthetic oligonucleotide
  Target: ANGPTL4; (+) strand; PAM type: NRG; PAM sequence: CAG
aatttcagagggaggagaga

SEQ ID NO: 13155 - DNA, 20 bp, Artificial Sequence
  Description of Artificial Sequence: Synthetic oligonucleotide
  Target: ANGPTL4; (+) strand; PAM type: NRG; PAM sequence: AAG
agagggaggagagacagaat

SEQ ID NO: 13156 - DNA, 20 bp, Artificial Sequence
  Description of Artificial Sequence: Synthetic oligonucleotide
  Target: ANGPTL4; (+) strand; PAM type: NRG; PAM sequence: AGG
gagggaggagagacagaata

SEQ ID NO: 13157 - DNA, 20 bp, Artificial Sequence
  Description of Artificial Sequence: Synthetic oligonucleotide
  Target: ANGPTL4; (+) strand; PAM type: NRG; PAM sequence: GAG
agagacagaataaggcaact

SEQ ID NO: 13158 - DNA, 20 bp, Artificial Sequence
  Description of Artificial Sequence: Synthetic oligonucleotide
  Target: ANGPTL4; (+) strand; PAM type: NRG; PAM sequence: AGG
gagacagaataaggcaactg

SEQ ID NO: 13159 - DNA, 20 bp, Artificial Sequence
  Description of Artificial Sequence: Synthetic oligonucleotide
  Target: ANGPTL4; (+) strand; PAM type: NRG; PAM sequence: TAG
aataaggcaactgaggatga

SEQ ID NO: 13160 - DNA, 20 bp, Artificial Sequence
  Description of Artificial Sequence: Synthetic oligonucleotide
  Target: ANGPTL4; (+) strand; PAM type: NRG; PAM sequence: GAG
taaggcaactgaggatgata

SEQ ID NO: 13161 - DNA, 20 bp, Artificial Sequence
  Description of Artificial Sequence: Synthetic oligonucleotide
  Target: ANGPTL4; (+) strand; PAM type: NRG; PAM sequence: AGG
aaggcaactgaggatgatag

SEQ ID NO: 13162 - DNA, 20 bp, Artificial Sequence
  Description of Artificial Sequence: Synthetic oligonucleotide
  Target: ANGPTL4; (+) strand; PAM type: NRG; PAM sequence: GGG
aggcaactgaggatgataga

SEQ ID NO: 13163 - DNA, 20 bp, Artificial Sequence
  Description of Artificial Sequence: Synthetic oligonucleotide
  Target: ANGPTL4; (+) strand; PAM type: NRG; PAM sequence: GAG
gcaactgaggatgatagagg

SEQ ID NO: 13164 - DNA, 20 bp, Artificial Sequence
  Description of Artificial Sequence: Synthetic oligonucleotide
  Target: ANGPTL4; (+) strand; PAM type: NRG; PAM sequence: AGG
caactgaggatgatagaggg

SEQ ID NO: 13165 - DNA, 20 bp, Artificial Sequence
  Description of Artificial Sequence: Synthetic oligonucleotide
  Target: ANGPTL4; (+) strand; PAM type: NRG; PAM sequence: GGG
aactgaggatgatagaggga

SEQ ID NO: 13166 - DNA, 20 bp, Artificial Sequence
  Description of Artificial Sequence: Synthetic oligonucleotide
  Target: ANGPTL4; (+) strand; PAM type: NRG; PAM sequence: GAG
ctgaggatgatagagggagg

SEQ ID NO: 13167 - DNA, 20 bp, Artificial Sequence
  Description of Artificial Sequence: Synthetic oligonucleotide
  Target: ANGPTL4; (+) strand; PAM type: NRG; PAM sequence: AGG
tgaggatgatagagggaggg

SEQ ID NO: 13168 - DNA, 20 bp, Artificial Sequence
  Description of Artificial Sequence: Synthetic oligonucleotide
  Target: ANGPTL4; (+) strand; PAM type: NRG; PAM sequence: CAG
ggatgatagagggagggagg

SEQ ID NO: 13169 - DNA, 20 bp, Artificial Sequence
  Description of Artificial Sequence: Synthetic oligonucleotide
  Target: ANGPTL4; (+) strand; PAM type: NRG; PAM sequence: GAG
atgatagagggagggaggca

SEQ ID NO: 13170 - DNA, 20 bp, Artificial Sequence
  Description of Artificial Sequence: Synthetic oligonucleotide
  Target: ANGPTL4; (+) strand; PAM type: NRG; PAM sequence: GAG
gatagagggagggaggcaga

SEQ ID NO: 13171 - DNA, 20 bp, Artificial Sequence
  Description of Artificial Sequence: Synthetic oligonucleotide
  Target: ANGPTL4; (+) strand; PAM type: NRG; PAM sequence: AGG
atagagggagggaggcagag

SEQ ID NO: 13172 - DNA, 20 bp, Artificial Sequence
  Description of Artificial Sequence: Synthetic oligonucleotide
  Target: ANGPTL4; (+) strand; PAM type: NRG; PAM sequence: GAG
agagggagggaggcagagag

SEQ ID NO: 13173 - DNA, 20 bp, Artificial Sequence
  Description of Artificial Sequence: Synthetic oligonucleotide
  Target: ANGPTL4; (+) strand; PAM type: NRG; PAM sequence: AAG
gggagggaggcagagaggag

SEQ ID NO: 13174 - DNA, 20 bp, Artificial Sequence
  Description of Artificial Sequence: Synthetic oligonucleotide
  Target: ANGPTL4; (+) strand; PAM type: NRG; PAM sequence: GAG
ggaggcagagaggagaagat

SEQ ID NO: 13175 - DNA, 20 bp, Artificial Sequence
  Description of Artificial Sequence: Synthetic oligonucleotide
  Target: ANGPTL4; (+) strand; PAM type: NRG; PAM sequence: CAG
gcagagaggagaagatgaga

SEQ ID NO: 13176 - DNA, 20 bp, Artificial Sequence
  Description of Artificial Sequence: Synthetic oligonucleotide
  Target: ANGPTL4; (+) strand; PAM type: NRG; PAM sequence: AAG
gagaggagaagatgagacag

SEQ ID NO: 13177 - DNA, 20 bp, Artificial Sequence
  Description of Artificial Sequence: Synthetic oligonucleotide
  Target: ANGPTL4; (+) strand; PAM type: NRG; PAM sequence: TGG
agacagaagtccatgtcctc

SEQ ID NO: 13178 - DNA, 20 bp, Artificial Sequence
  Description of Artificial Sequence: Synthetic oligonucleotide
  Target: ANGPTL4; (+) strand; PAM type: NRG; PAM sequence: GGG
gacagaagtccatgtcctct

SEQ ID NO: 13179 - DNA, 20 bp, Artificial Sequence
  Description of Artificial Sequence: Synthetic oligonucleotide
  Target: ANGPTL4; (+) strand; PAM type: NRG; PAM sequence: TGG
tccatgtcctctgggtttga

SEQ ID NO: 13180 - DNA, 20 bp, Artificial Sequence
  Description of Artificial Sequence: Synthetic oligonucleotide
  Target: ANGPTL4; (+) strand; PAM type: NRG; PAM sequence: GGG
ccatgtcctctgggtttgat

SEQ ID NO: 13181 - DNA, 20 bp, Artificial Sequence
  Description of Artificial Sequence: Synthetic oligonucleotide
  Target: ANGPTL4; (+) strand; PAM type: NRG; PAM sequence: GAG
atgtcctctgggtttgatgg

SEQ ID NO: 13182 - DNA, 20 bp, Artificial Sequence
  Description of Artificial Sequence: Synthetic oligonucleotide
  Target: ANGPTL4; (+) strand; PAM type: NRG; PAM sequence: AGG
tgtcctctgggtttgatggg

SEQ ID NO: 13183 - DNA, 20 bp, Artificial Sequence
  Description of Artificial Sequence: Synthetic oligonucleotide
  Target: ANGPTL4; (+) strand; PAM type: NRG; PAM sequence: GGG
gtcctctgggtttgatggga

SEQ ID NO: 13184 - DNA, 20 bp, Artificial Sequence
  Description of Artificial Sequence: Synthetic oligonucleotide
  Target: ANGPTL4; (+) strand; PAM type: NRG; PAM sequence: GAG
cctctgggtttgatgggagg

SEQ ID NO: 13185 - DNA, 20 bp, Artificial Sequence
  Description of Artificial Sequence: Synthetic oligonucleotide
  Target: ANGPTL4; (+) strand; PAM type: NRG; PAM sequence: AGG
ctctgggtttgatgggaggg

SEQ ID NO: 13186 - DNA, 20 bp, Artificial Sequence
  Description of Artificial Sequence: Synthetic oligonucleotide
  Target: ANGPTL4; (+) strand; PAM type: NRG; PAM sequence: GGG
tctgggtttgatgggaggga

SEQ ID NO: 13187 - DNA, 20 bp, Artificial Sequence
  Description of Artificial Sequence: Synthetic oligonucleotide
  Target: ANGPTL4; (+) strand; PAM type: NRG; PAM sequence: AAG
gggtttgatgggagggaggg

SEQ ID NO: 13188 - DNA, 20 bp, Artificial Sequence
  Description of Artificial Sequence: Synthetic oligonucleotide
  Target: ANGPTL4; (+) strand; PAM type: NRG; PAM sequence: AGG
ggtttgatgggagggaggga

SEQ ID NO: 13189 - DNA, 20 bp, Artificial Sequence
  Description of Artificial Sequence: Synthetic oligonucleotide
  Target: ANGPTL4; (+) strand; PAM type: NRG; PAM sequence: AAG
ttgatgggagggagggaagg

SEQ ID NO: 13190 - DNA, 20 bp, Artificial Sequence
  Description of Artificial Sequence: Synthetic oligonucleotide
  Target: ANGPTL4; (+) strand; PAM type: NRG; PAM sequence: AGG
tgatgggagggagggaagga

SEQ ID NO: 13191 - DNA, 20 bp, Artificial Sequence
  Description of Artificial Sequence: Synthetic oligonucleotide
  Target: ANGPTL4; (+) strand; PAM type: NRG; PAM sequence: TGG
gggagggagggaaggaagga

SEQ ID NO: 13192 - DNA, 20 bp, Artificial Sequence
  Description of Artificial Sequence: Synthetic oligonucleotide
  Target: ANGPTL4; (+) strand; PAM type: NRG; PAM sequence: GAG
gagggagggaaggaaggatg

SEQ ID NO: 13193 - DNA, 20 bp, Artificial Sequence
  Description of Artificial Sequence: Synthetic oligonucleotide
  Target: ANGPTL4; (+) strand; PAM type: NRG; PAM sequence: AAG
ggaaggaaggatggagacac

SEQ ID NO: 13194 - DNA, 20 bp, Artificial Sequence
  Description of Artificial Sequence: Synthetic oligonucleotide
  Target: ANGPTL4; (+) strand; PAM type: NRG; PAM sequence: GAG
aaggaaggatggagacacaa

SEQ ID NO: 13195 - DNA, 20 bp, Artificial Sequence
  Description of Artificial Sequence: Synthetic oligonucleotide
  Target: ANGPTL4; (+) strand; PAM type: NRG; PAM sequence: AGG
aggaaggatggagacacaag

SEQ ID NO: 13196 - DNA, 20 bp, Artificial Sequence
  Description of Artificial Sequence: Synthetic oligonucleotide
  Target: ANGPTL4; (+) strand; PAM type: NRG; PAM sequence: GGG
ggaaggatggagacacaaga

SEQ ID NO: 13197 - DNA, 20 bp, Artificial Sequence
  Description of Artificial Sequence: Synthetic oligonucleotide
  Target: ANGPTL4; (+) strand; PAM type: NRG; PAM sequence: GGG
gaaggatggagacacaagag

SEQ ID NO: 13198 - DNA, 20 bp, Artificial Sequence
  Description of Artificial Sequence: Synthetic oligonucleotide
  Target: ANGPTL4; (+) strand; PAM type: NRG; PAM sequence: GGG
aaggatggagacacaagagg

SEQ ID NO: 13199 - DNA, 20 bp, Artificial Sequence
  Description of Artificial Sequence: Synthetic oligonucleotide
  Target: ANGPTL4; (+) strand; PAM type: NRG; PAM sequence: GAG
ggatggagacacaagagggg

SEQ ID NO: 13200 - DNA, 20 bp, Artificial Sequence
  Description of Artificial Sequence: Synthetic oligonucleotide
  Target: ANGPTL4; (+) strand; PAM type: NRG; PAM sequence: TGG
tggagacacaagagggggag

SEQ ID NO: 13201 - DNA, 20 bp, Artificial Sequence
  Description of Artificial Sequence: Synthetic oligonucleotide
  Target: ANGPTL4; (+) strand; PAM type: NRG; PAM sequence: TGG
cacaagagggggagtggata

SEQ ID NO: 13202 - DNA, 20 bp, Artificial Sequence
  Description of Artificial Sequence: Synthetic oligonucleotide
  Target: ANGPTL4; (+) strand; PAM type: NRG; PAM sequence: GGG
acaagagggggagtggatat

SEQ ID NO: 13203 - DNA, 20 bp, Artificial Sequence
  Description of Artificial Sequence: Synthetic oligonucleotide
  Target: ANGPTL4; (+) strand; PAM type: NRG; PAM sequence: GGG
caagagggggagtggatatg

SEQ ID NO: 13204 - DNA, 20 bp, Artificial Sequence
  Description of Artificial Sequence: Synthetic oligonucleotide
  Target: ANGPTL4; (+) strand; PAM type: NRG; PAM sequence: AAG
gagggggagtggatatgggg

SEQ ID NO: 13205 - DNA, 20 bp, Artificial Sequence
  Description of Artificial Sequence: Synthetic oligonucleotide
  Target: ANGPTL4; (+) strand; PAM type: NRG; PAM sequence: AGG
agggggagtggatatgggga

SEQ ID NO: 13206 - DNA, 20 bp, Artificial Sequence
  Description of Artificial Sequence: Synthetic oligonucleotide
  Target: ANGPTL4; (+) strand; PAM type: NRG; PAM sequence: GAG
ggggagtggatatggggaag

SEQ ID NO: 13207 - DNA, 20 bp, Artificial Sequence
  Description of Artificial Sequence: Synthetic oligonucleotide
  Target: ANGPTL4; (+) strand; PAM type: NRG; PAM sequence: TGG
gaaggagtcaaatttgttta

SEQ ID NO: 13208 - DNA, 20 bp, Artificial Sequence
  Description of Artificial Sequence: Synthetic oligonucleotide
  Target: ANGPTL4; (+) strand; PAM type: NRG; PAM sequence: GGG
aaggagtcaaatttgtttat

SEQ ID NO: 13209 - DNA, 20 bp, Artificial Sequence
  Description of Artificial Sequence: Synthetic oligonucleotide
  Target: ANGPTL4; (+) strand; PAM type: NRG; PAM sequence: GAG
tcaaatttgtttatgggatt

SEQ ID NO: 13210 - DNA, 20 bp, Artificial Sequence
  Description of Artificial Sequence: Synthetic oligonucleotide
  Target: ANGPTL4; (+) strand; PAM type: NRG; PAM sequence: GAG
aaatttgtttatgggattga

SEQ ID NO: 13211 - DNA, 20 bp, Artificial Sequence
  Description of Artificial Sequence: Synthetic oligonucleotide
  Target: ANGPTL4; (+) strand; PAM type: NRG; PAM sequence: AGG
aatttgtttatgggattgag

SEQ ID NO: 13212 - DNA, 20 bp, Artificial Sequence
  Description of Artificial Sequence: Synthetic oligonucleotide
  Target: ANGPTL4; (+) strand; PAM type: NRG; PAM sequence: AAG
gtttatgggattgagaggtg

SEQ ID NO: 13213 - DNA, 20 bp, Artificial Sequence
  Description of Artificial Sequence: Synthetic oligonucleotide
  Target: ANGPTL4; (+) strand; PAM type: NRG; PAM sequence: CGG
atgggattgagaggtgaagc

SEQ ID NO: 13214 - DNA, 20 bp, Artificial Sequence
  Description of Artificial Sequence: Synthetic oligonucleotide
  Target: ANGPTL4; (+) strand; PAM type: NRG; PAM sequence: TAG
gattgagaggtgaagccggc

SEQ ID NO: 13215 - DNA, 20 bp, Artificial Sequence
  Description of Artificial Sequence: Synthetic oligonucleotide
  Target: ANGPTL4; (+) strand; PAM type: NRG; PAM sequence: AGG
attgagaggtgaagccggct

SEQ ID NO: 13216 - DNA, 20 bp, Artificial Sequence
  Description of Artificial Sequence: Synthetic oligonucleotide
  Target: ANGPTL4; (+) strand; PAM type: NRG; PAM sequence: TGG
ggtgaagccggctaggcttc

SEQ ID NO: 13217 - DNA, 20 bp, Artificial Sequence
  Description of Artificial Sequence: Synthetic oligonucleotide
  Target: ANGPTL4; (+) strand; PAM type: NRG; PAM sequence: GGG
gtgaagccggctaggcttct

SEQ ID NO: 13218 - DNA, 20 bp, Artificial Sequence
  Description of Artificial Sequence: Synthetic oligonucleotide
  Target: ANGPTL4; (+) strand; PAM type: NRG; PAM sequence: CGG
agccggctaggcttctgggt

SEQ ID NO: 13219 - DNA, 20 bp, Artificial Sequence
  Description of Artificial Sequence: Synthetic oligonucleotide
  Target: ANGPTL4; (+) strand; PAM type: NRG; PAM sequence: GGG
gccggctaggcttctgggtc

SEQ ID NO: 13220 - DNA, 20 bp, Artificial Sequence
  Description of Artificial Sequence: Synthetic oligonucleotide
  Target: ANGPTL4; (+) strand; PAM type: NRG; PAM sequence: TGG
ggctaggcttctgggtcggg

SEQ ID NO: 13221 - DNA, 20 bp, Artificial Sequence
  Description of Artificial Sequence: Synthetic oligonucleotide
  Target: ANGPTL4; (+) strand; PAM type: NRG; PAM sequence: GGG
gctaggcttctgggtcgggt

SEQ ID NO: 13222 - DNA, 20 bp, Artificial Sequence
  Description of Artificial Sequence: Synthetic oligonucleotide
  Target: ANGPTL4; (+) strand; PAM type: NRG; PAM sequence: GGG
ctaggcttctgggtcgggtg

SEQ ID NO: 13223 - DNA, 20 bp, Artificial Sequence
  Description of Artificial Sequence: Synthetic oligonucleotide
  Target: ANGPTL4; (+) strand; PAM type: NRG; PAM sequence: TAG
gggacttgaacttttctgtc

SEQ ID NO: 13224 - DNA, 20 bp, Artificial Sequence
  Description of Artificial Sequence: Synthetic oligonucleotide
  Target: ANGPTL4; (+) strand; PAM type: NRG; PAM sequence: AAG
tgaacttttctgtctagcta

SEQ ID NO: 13225 - DNA, 20 bp, Artificial Sequence
  Description of Artificial Sequence: Synthetic oligonucleotide
  Target: ANGPTL4; (+) strand; PAM type: NRG; PAM sequence: AGG
gaacttttctgtctagctaa

SEQ ID NO: 13226 - DNA, 20 bp, Artificial Sequence
  Description of Artificial Sequence: Synthetic oligonucleotide
  Target: ANGPTL4; (+) strand; PAM type: NRG; PAM sequence: CAG
aggattgtaaacgtaccaat

SEQ ID NO: 13227 - DNA, 20 bp, Artificial Sequence
  Description of Artificial Sequence: Synthetic oligonucleotide
  Target: ANGPTL4; (+) strand; PAM type: NRG; PAM sequence: TAG
accaatcagcactctgtgtc

SEQ ID NO: 13228 - DNA, 20 bp, Artificial Sequence
  Description of Artificial Sequence: Synthetic oligonucleotide
  Target: ANGPTL4; (+) strand; PAM type: NRG; PAM sequence: AAG
cagcactctgtgtctagcta

SEQ ID NO: 13229 - DNA, 20 bp, Artificial Sequence
  Description of Artificial Sequence: Synthetic oligonucleotide
  Target: ANGPTL4; (+) strand; PAM type: NRG; PAM sequence: AGG
agcactctgtgtctagctaa

SEQ ID NO: 13230 - DNA, 20 bp, Artificial Sequence
  Description of Artificial Sequence: Synthetic oligonucleotide
  Target: ANGPTL4; (+) strand; PAM type: NRG; PAM sequence: CAG
aggattgtaaatgcaccaat

SEQ ID NO: 13231 - DNA, 20 bp, Artificial Sequence
  Description of Artificial Sequence: Synthetic oligonucleotide
  Target: ANGPTL4; (+) strand; PAM type: NRG; PAM sequence: TAG
accaatcagcactctgtgtc

SEQ ID NO: 13232 - DNA, 20 bp, Artificial Sequence
  Description of Artificial Sequence: Synthetic oligonucleotide
  Target: ANGPTL4; (+) strand; PAM type: NRG; PAM sequence: AAG
cagcactctgtgtctagcta

SEQ ID NO: 13233 - DNA, 20 bp, Artificial Sequence
  Description of Artificial Sequence: Synthetic oligonucleotide
  Target: ANGPTL4; (+) strand; PAM type: NRG; PAM sequence: AGG
agcactctgtgtctagctaa

SEQ ID NO: 13234 - DNA, 20 bp, Artificial Sequence
  Description of Artificial Sequence: Synthetic oligonucleotide
  Target: ANGPTL4; (+) strand; PAM type: NRG; PAM sequence: CAG
aggtttgtaaatgcaccaat

SEQ ID NO: 13235 - DNA, 20 bp, Artificial Sequence
  Description of Artificial Sequence: Synthetic oligonucleotide
  Target: ANGPTL4; (+) strand; PAM type: NRG; PAM sequence: TAG
accaatcagcgctctgtgtc

SEQ ID NO: 13236 - DNA, 20 bp, Artificial Sequence
  Description of Artificial Sequence: Synthetic oligonucleotide
  Target: ANGPTL4; (+) strand; PAM type: NRG; PAM sequence: CAG
gcgctctgtgtctagctaat

SEQ ID NO: 13237 - DNA, 20 bp, Artificial Sequence
  Description of Artificial Sequence: Synthetic oligonucleotide
  Target: ANGPTL4; (+) strand; PAM type: NRG; PAM sequence: AGG
cgctctgtgtctagctaatc

SEQ ID NO: 13238 - DNA, 20 bp, Artificial Sequence
  Description of Artificial Sequence: Synthetic oligonucleotide
  Target: ANGPTL4; (+) strand; PAM type: NRG; PAM sequence: TAG
tctgtgtctagctaatcagg

SEQ ID NO: 13239 - DNA, 20 bp, Artificial Sequence
  Description of Artificial Sequence: Synthetic oligonucleotide
  Target: ANGPTL4; (+) strand; PAM type: NRG; PAM sequence: AGG
ctgtgtctagctaatcaggt

SEQ ID NO: 13240 - DNA, 20 bp, Artificial Sequence
  Description of Artificial Sequence: Synthetic oligonucleotide
  Target: ANGPTL4; (+) strand; PAM type: NRG; PAM sequence: GGG
tgtgtctagctaatcaggta

SEQ ID NO: 13241 - DNA, 20 bp, Artificial Sequence
  Description of Artificial Sequence: Synthetic oligonucleotide
  Target: ANGPTL4; (+) strand; PAM type: NRG; PAM sequence: GGG
gtgtctagctaatcaggtag

SEQ ID NO: 13242 - DNA, 20 bp, Artificial Sequence
  Description of Artificial Sequence: Synthetic oligonucleotide
  Target: ANGPTL4; (+) strand; PAM type: NRG; PAM sequence: TGG
agctaatcaggtaggggact

SEQ ID NO: 13243 - DNA, 20 bp, Artificial Sequence
  Description of Artificial Sequence: Synthetic oligonucleotide
  Target: ANGPTL4; (+) strand; PAM type: NRG; PAM sequence: GAG
ctaatcaggtaggggacttg

SEQ ID NO: 13244 - DNA, 20 bp, Artificial Sequence
  Description of Artificial Sequence: Synthetic oligonucleotide
  Target: ANGPTL4; (-) strand; PAM type: YTN; PAM sequence: TTG
ggtgacagagcaagactctg

SEQ ID NO: 13245 - DNA, 20 bp, Artificial Sequence
  Description of Artificial Sequence: Synthetic oligonucleotide
  Target: ANGPTL4; (-) strand; PAM type: YTN; PAM sequence: CTT
gggtgacagagcaagactct

SEQ ID NO: 13246 - DNA, 20 bp, Artificial Sequence
  Description of Artificial Sequence: Synthetic oligonucleotide
  Target: ANGPTL4; (-) strand; PAM type: YTN; PAM sequence: CTC
cagcttgggtgacagagcaa

SEQ ID NO: 13247 - DNA, 20 bp, Artificial Sequence
  Description of Artificial Sequence: Synthetic oligonucleotide
  Target: ANGPTL4; (-) strand; PAM type: YTN; PAM sequence: TTG
cactccagcttgggtgacag

SEQ ID NO: 13248 - DNA, 20 bp, Artificial Sequence
  Description of Artificial Sequence: Synthetic oligonucleotide
  Target: ANGPTL4; (-) strand; PAM type: YTN; PAM sequence: CTG
cagtaagcggagatcgtacc

SEQ ID NO: 13249 - DNA, 20 bp, Artificial Sequence
  Description of Artificial Sequence: Synthetic oligonucleotide
  Target: ANGPTL4; (-) strand; PAM type: YTN; PAM sequence: TTG
aacccaggaggtggaggctg

SEQ ID NO: 13250 - DNA, 20 bp, Artificial Sequence
  Description of Artificial Sequence: Synthetic oligonucleotide
  Target: ANGPTL4; (-) strand; PAM type: YTN; PAM sequence: CTT
gaacccaggaggtggaggct

SEQ ID NO: 13251 - DNA, 20 bp, Artificial Sequence
  Description of Artificial Sequence: Synthetic oligonucleotide
  Target: ANGPTL4; (-) strand; PAM type: YTN; PAM sequence: TTC
gcttgaacccaggaggtgga

SEQ ID NO: 13252 - DNA, 20 bp, Artificial Sequence
  Description of Artificial Sequence: Synthetic oligonucleotide
  Target: ANGPTL4; (-) strand; PAM type: YTN; PAM sequence: CTG
aggtgggagattcgcttgaa

SEQ ID NO: 13253 - DNA, 20 bp, Artificial Sequence
  Description of Artificial Sequence: Synthetic oligonucleotide
  Target: ANGPTL4; (-) strand; PAM type: YTN; PAM sequence: TTG
tgaggctgaggtgggagatt

SEQ ID NO: 13254 - DNA, 20 bp, Artificial Sequence
  Description of Artificial Sequence: Synthetic oligonucleotide
  Target: ANGPTL4; (-) strand; PAM type: YTN; PAM sequence: TTT
gtgaggctgaggtgggagat

SEQ ID NO: 13255 - DNA, 20 bp, Artificial Sequence
  Description of Artificial Sequence: Synthetic oligonucleotide
  Target: ANGPTL4; (-) strand; PAM type: YTN; PAM sequence: CTA
tttgtgaggctgaggtggga

SEQ ID NO: 13256 - DNA, 20 bp, Artificial Sequence
  Description of Artificial Sequence: Synthetic oligonucleotide
  Target: ANGPTL4; (-) strand; PAM type: YTN; PAM sequence: CTC
agctatttgtgaggctgagg

SEQ ID NO: 13257 - DNA, 20 bp, Artificial Sequence
  Description of Artificial Sequence: Synthetic oligonucleotide
  Target: ANGPTL4; (-) strand; PAM type: YTN; PAM sequence: TTA
gcaggcatggtggtgtgtgg

SEQ ID NO: 13258 - DNA, 20 bp, Artificial Sequence
  Description of Artificial Sequence: Synthetic oligonucleotide
  Target: ANGPTL4; (-) strand; PAM type: YTN; PAM sequence: CTA
aaaatacagaaattagcagg

SEQ ID NO: 13259 - DNA, 20 bp, Artificial Sequence
  Description of Artificial Sequence: Synthetic oligonucleotide
  Target: ANGPTL4; (-) strand; PAM type: YTN; PAM sequence: CTA
ctaaaaatacagaaattagc

SEQ ID NO: 13260 - DNA, 20 bp, Artificial Sequence
  Description of Artificial Sequence: Synthetic oligonucleotide
  Target: ANGPTL4; (-) strand; PAM type: YTN; PAM sequence: CTC
tactaaaaatacagaaatta

SEQ ID NO: 13261 - DNA, 20 bp, Artificial Sequence
  Description of Artificial Sequence: Synthetic oligonucleotide
  Target: ANGPTL4; (-) strand; PAM type: YTN; PAM sequence: CTG
gccagcatggtgaaacccca

SEQ ID NO: 13262 - DNA, 20 bp, Artificial Sequence
  Description of Artificial Sequence: Synthetic oligonucleotide
  Target: ANGPTL4; (-) strand; PAM type: YTN; PAM sequence: TTC
gagaccagcctggccagcat

SEQ ID NO: 13263 - DNA, 20 bp, Artificial Sequence
  Description of Artificial Sequence: Synthetic oligonucleotide
  Target: ANGPTL4; (-) strand; PAM type: YTN; PAM sequence: CTG
ggagttcgagaccagcctgg

SEQ ID NO: 13264 - DNA, 20 bp, Artificial Sequence
  Description of Artificial Sequence: Synthetic oligonucleotide
  Target: ANGPTL4; (-) strand; PAM type: YTN; PAM sequence: TTG
agtctgggagttcgagacca

SEQ ID NO: 13265 - DNA, 20 bp, Artificial Sequence
  Description of Artificial Sequence: Synthetic oligonucleotide
  Target: ANGPTL4; (-) strand; PAM type: YTN; PAM sequence: CTT
gagtctgggagttcgagacc

SEQ ID NO: 13266 - DNA, 20 bp, Artificial Sequence
  Description of Artificial Sequence: Synthetic oligonucleotide
  Target: ANGPTL4; (-) strand; PAM type: YTN; PAM sequence: CTG
aggtgggtggatcacttgag

SEQ ID NO: 13267 - DNA, 20 bp, Artificial Sequence
  Description of Artificial Sequence: Synthetic oligonucleotide
  Target: ANGPTL4; (-) strand; PAM type: YTN; PAM sequence: TTG
ggaggctgaggtgggtggat

SEQ ID NO: 13268 - DNA, 20 bp, Artificial Sequence
  Description of Artificial Sequence: Synthetic oligonucleotide
  Target: ANGPTL4; (-) strand; PAM type: YTN; PAM sequence: TTT
gggaggctgaggtgggtgga

SEQ ID NO: 13269 - DNA, 20 bp, Artificial Sequence
  Description of Artificial Sequence: Synthetic oligonucleotide
  Target: ANGPTL4; (-) strand; PAM type: YTN; PAM sequence: CTT
tgggaggctgaggtgggtgg

SEQ ID NO: 13270 - DNA, 20 bp, Artificial Sequence
  Description of Artificial Sequence: Synthetic oligonucleotide
  Target: ANGPTL4; (-) strand; PAM type: YTN; PAM sequence: CTA
gcactttgggaggctgaggt

SEQ ID NO: 13271 - DNA, 20 bp, Artificial Sequence
  Description of Artificial Sequence: Synthetic oligonucleotide
  Target: ANGPTL4; (-) strand; PAM type: YTN; PAM sequence: CTG
taatcctagcactttgggag

SEQ ID NO: 13272 - DNA, 20 bp, Artificial Sequence
  Description of Artificial Sequence: Synthetic oligonucleotide
  Target: ANGPTL4; (-) strand; PAM type: YTN; PAM sequence: CTC
acacctgtaatcctagcact

SEQ ID NO: 13273 - DNA, 20 bp, Artificial Sequence
  Description of Artificial Sequence: Synthetic oligonucleotide
  Target: ANGPTL4; (-) strand; PAM type: YTN; PAM sequence: CTG
gggcccggcatggtggctca

SEQ ID NO: 13274 - DNA, 20 bp, Artificial Sequence
  Description of Artificial Sequence: Synthetic oligonucleotide
  Target: ANGPTL4; (-) strand; PAM type: YTN; PAM sequence: TTA
gctggggcccggcatggtgg

SEQ ID NO: 13275 - DNA, 20 bp, Artificial Sequence
  Description of Artificial Sequence: Synthetic oligonucleotide
  Target: ANGPTL4; (-) strand; PAM type: YTN; PAM sequence: CTC
aaaaaaaaaaaaaaattagc

SEQ ID NO: 13276 - DNA, 20 bp, Artificial Sequence
  Description of Artificial Sequence: Synthetic oligonucleotide
  Target: ANGPTL4; (-) strand; PAM type: YTN; PAM sequence: CTG
tctcaaaaaaaaaaaaaaat

SEQ ID NO: 13277 - DNA, 20 bp, Artificial Sequence
  Description of Artificial Sequence: Synthetic oligonucleotide
  Target: ANGPTL4; (-) strand; PAM type: YTN; PAM sequence: CTC
tgtctcaaaaaaaaaaaaaa

SEQ ID NO: 13278 - DNA, 20 bp, Artificial Sequence
  Description of Artificial Sequence: Synthetic oligonucleotide
  Target: ANGPTL4; (-) strand; PAM type: YTN; PAM sequence: CTG
ggcaacagggcgagactctg

SEQ ID NO: 13279 - DNA, 20 bp, Artificial Sequence
  Description of Artificial Sequence: Synthetic oligonucleotide
  Target: ANGPTL4; (-) strand; PAM type: YTN; PAM sequence: CTC
cagcctgggcaacagggcga

SEQ ID NO: 13280 - DNA, 20 bp, Artificial Sequence
  Description of Artificial Sequence: Synthetic oligonucleotide
  Target: ANGPTL4; (-) strand; PAM type: YTN; PAM sequence: CTG
cactccagcctgggcaacag

SEQ ID NO: 13281 - DNA, 20 bp, Artificial Sequence
  Description of Artificial Sequence: Synthetic oligonucleotide
  Target: ANGPTL4; (-) strand; PAM type: YTN; PAM sequence: TTG
cgccactgcactccagcctg

SEQ ID NO: 13282 - DNA, 20 bp, Artificial Sequence
  Description of Artificial Sequence: Synthetic oligonucleotide
  Target: ANGPTL4; (-) strand; PAM type: YTN; PAM sequence: CTG
gaacccgggaggcagagggt

SEQ ID NO: 13283 - DNA, 20 bp, Artificial Sequence
  Description of Artificial Sequence: Synthetic oligonucleotide
  Target: ANGPTL4; (-) strand; PAM type: YTN; PAM sequence: CTG
gggcaggagaatcgctggaa

SEQ ID NO: 13284 - DNA, 20 bp, Artificial Sequence
  Description of Artificial Sequence: Synthetic oligonucleotide
  Target: ANGPTL4; (-) strand; PAM type: YTN; PAM sequence: CTC
gggaggctggggcaggagaa

SEQ ID NO: 13285 - DNA, 20 bp, Artificial Sequence
  Description of Artificial Sequence: Synthetic oligonucleotide
  Target: ANGPTL4; (-) strand; PAM type: YTN; PAM sequence: TTA
ctcgggaggctggggcagga

SEQ ID NO: 13286 - DNA, 20 bp, Artificial Sequence
  Description of Artificial Sequence: Synthetic oligonucleotide
  Target: ANGPTL4; (-) strand; PAM type: YTN; PAM sequence: CTG
taatcccagttactcgggag

SEQ ID NO: 13287 - DNA, 20 bp, Artificial Sequence
  Description of Artificial Sequence: Synthetic oligonucleotide
  Target: ANGPTL4; (-) strand; PAM type: YTN; PAM sequence: TTA
gccaggcgtggaggcgcgcg

SEQ ID NO: 13288 - DNA, 20 bp, Artificial Sequence
  Description of Artificial Sequence: Synthetic oligonucleotide
  Target: ANGPTL4; (-) strand; PAM type: YTN; PAM sequence: CTA
aaaatgtaaaaattagccag

SEQ ID NO: 13289 - DNA, 20 bp, Artificial Sequence
  Description of Artificial Sequence: Synthetic oligonucleotide
  Target: ANGPTL4; (-) strand; PAM type: YTN; PAM sequence: CTA
ctaaaaatgtaaaaattagc

SEQ ID NO: 13290 - DNA, 20 bp, Artificial Sequence
  Description of Artificial Sequence: Synthetic oligonucleotide
  Target: ANGPTL4; (-) strand; PAM type: YTN; PAM sequence: CTC
tactaaaaatgtaaaaatta

SEQ ID NO: 13291 - DNA, 20 bp, Artificial Sequence
  Description of Artificial Sequence: Synthetic oligonucleotide
  Target: ANGPTL4; (-) strand; PAM type: YTN; PAM sequence: CTG
accaacatggtgaaacccgg

SEQ ID NO: 13292 - DNA, 20 bp, Artificial Sequence
  Description of Artificial Sequence: Synthetic oligonucleotide
  Target: ANGPTL4; (-) strand; PAM type: YTN; PAM sequence: TTC
gagaccagcctgaccaacat

SEQ ID NO: 13293 - DNA, 20 bp, Artificial Sequence
  Description of Artificial Sequence: Synthetic oligonucleotide
  Target: ANGPTL4; (-) strand; PAM type: YTN; PAM sequence: TTG
ggagtccaaggtgggcagat

SEQ ID NO: 13294 - DNA, 20 bp, Artificial Sequence
  Description of Artificial Sequence: Synthetic oligonucleotide
  Target: ANGPTL4; (-) strand; PAM type: YTN; PAM sequence: TTT
gggagtccaaggtgggcaga

SEQ ID NO: 13295 - DNA, 20 bp, Artificial Sequence
  Description of Artificial Sequence: Synthetic oligonucleotide
  Target: ANGPTL4; (-) strand; PAM type: YTN; PAM sequence: CTT
tgggagtccaaggtgggcag

SEQ ID NO: 13296 - DNA, 20 bp, Artificial Sequence
  Description of Artificial Sequence: Synthetic oligonucleotide
  Target: ANGPTL4; (-) strand; PAM type: YTN; PAM sequence: CTG
taataccagcactttgggag

SEQ ID NO: 13297 - DNA, 20 bp, Artificial Sequence
  Description of Artificial Sequence: Synthetic oligonucleotide
  Target: ANGPTL4; (-) strand; PAM type: YTN; PAM sequence: CTC
atgcctgtaataccagcact

SEQ ID NO: 13298 - DNA, 20 bp, Artificial Sequence
  Description of Artificial Sequence: Synthetic oligonucleotide
  Target: ANGPTL4; (-) strand; PAM type: YTN; PAM sequence: CTG
ggcacggtggctcatgcctg

SEQ ID NO: 13299 - DNA, 20 bp, Artificial Sequence
  Description of Artificial Sequence: Synthetic oligonucleotide
  Target: ANGPTL4; (-) strand; PAM type: YTN; PAM sequence: CTG
gggccaggctgggcacggtg

SEQ ID NO: 13300 - DNA, 20 bp, Artificial Sequence
  Description of Artificial Sequence: Synthetic oligonucleotide
  Target: ANGPTL4; (-) strand; PAM type: YTN; PAM sequence: TTA
gctggggccaggctgggcac

SEQ ID NO: 13301 - DNA, 20 bp, Artificial Sequence
  Description of Artificial Sequence: Synthetic oligonucleotide
  Target: ANGPTL4; (-) strand; PAM type: YTN; PAM sequence: TTA
aaaaattagctggggccagg

SEQ ID NO: 13302 - DNA, 20 bp, Artificial Sequence
  Description of Artificial Sequence: Synthetic oligonucleotide
  Target: ANGPTL4; (-) strand; PAM type: YTN; PAM sequence: TTT
aaaaaattagctggggccag

SEQ ID NO: 13303 - DNA, 20 bp, Artificial Sequence
  Description of Artificial Sequence: Synthetic oligonucleotide
  Target: ANGPTL4; (-) strand; PAM type: YTN; PAM sequence: CTG
tacaaaaaatttaaaaaatt

SEQ ID NO: 13304 - DNA, 20 bp, Artificial Sequence
  Description of Artificial Sequence: Synthetic oligonucleotide
  Target: ANGPTL4; (-) strand; PAM type: YTN; PAM sequence: CTG
tctgtacaaaaaatttaaaa

SEQ ID NO: 13305 - DNA, 20 bp, Artificial Sequence
  Description of Artificial Sequence: Synthetic oligonucleotide
  Target: ANGPTL4; (-) strand; PAM type: YTN; PAM sequence: TTG
ggtaacatggcaagaccctg

SEQ ID NO: 13306 - DNA, 20 bp, Artificial Sequence
  Description of Artificial Sequence: Synthetic oligonucleotide
  Target: ANGPTL4; (-) strand; PAM type: YTN; PAM sequence: TTC
aagattgggtaacatggcaa

SEQ ID NO: 13307 - DNA, 20 bp, Artificial Sequence
  Description of Artificial Sequence: Synthetic oligonucleotide
  Target: ANGPTL4; (-) strand; PAM type: YTN; PAM sequence: TTG
agcccaggagttcaagattg

SEQ ID NO: 13308 - DNA, 20 bp, Artificial Sequence
  Description of Artificial Sequence: Synthetic oligonucleotide
  Target: ANGPTL4; (-) strand; PAM type: YTN; PAM sequence: CTT
gagcccaggagttcaagatt

SEQ ID NO: 13309 - DNA, 20 bp, Artificial Sequence
  Description of Artificial Sequence: Synthetic oligonucleotide
  Target: ANGPTL4; (-) strand; PAM type: YTN; PAM sequence: CTG
cttgagcccaggagttcaag

SEQ ID NO: 13310 - DNA, 20 bp, Artificial Sequence
  Description of Artificial Sequence: Synthetic oligonucleotide
  Target: ANGPTL4; (-) strand; PAM type: YTN; PAM sequence: TTG
ggaggccaaggtgggaggac

SEQ ID NO: 13311 - DNA, 20 bp, Artificial Sequence
  Description of Artificial Sequence: Synthetic oligonucleotide
  Target: ANGPTL4; (-) strand; PAM type: YTN; PAM sequence: TTT
gggaggccaaggtgggagga

SEQ ID NO: 13312 - DNA, 20 bp, Artificial Sequence
  Description of Artificial Sequence: Synthetic oligonucleotide
  Target: ANGPTL4; (-) strand; PAM type: YTN; PAM sequence: CTT
tgggaggccaaggtgggagg

SEQ ID NO: 13313 - DNA, 20 bp, Artificial Sequence
  Description of Artificial Sequence: Synthetic oligonucleotide
  Target: ANGPTL4; (-) strand; PAM type: YTN; PAM sequence: TTG
taatcccagtactttgggag

SEQ ID NO: 13314 - DNA, 20 bp, Artificial Sequence
  Description of Artificial Sequence: Synthetic oligonucleotide
  Target: ANGPTL4; (-) strand; PAM type: YTN; PAM sequence: CTT
gtaatcccagtactttggga

SEQ ID NO: 13315 - DNA, 20 bp, Artificial Sequence
  Description of Artificial Sequence: Synthetic oligonucleotide
  Target: ANGPTL4; (-) strand; PAM type: YTN; PAM sequence: CTC
atgcttgtaatcccagtact

SEQ ID NO: 13316 - DNA, 20 bp, Artificial Sequence
  Description of Artificial Sequence: Synthetic oligonucleotide
  Target: ANGPTL4; (-) strand; PAM type: YTN; PAM sequence: CTA
ggcaaggtggctcatgcttg

SEQ ID NO: 13317 - DNA, 20 bp, Artificial Sequence
  Description of Artificial Sequence: Synthetic oligonucleotide
  Target: ANGPTL4; (-) strand; PAM type: YTN; PAM sequence: TTA
agctaggcaaggtggctcat

SEQ ID NO: 13318 - DNA, 20 bp, Artificial Sequence
  Description of Artificial Sequence: Synthetic oligonucleotide
  Target: ANGPTL4; (-) strand; PAM type: YTN; PAM sequence: CTA
caaatgtaaatgccattaag

SEQ ID NO: 13319 - DNA, 20 bp, Artificial Sequence
  Description of Artificial Sequence: Synthetic oligonucleotide
  Target: ANGPTL4; (-) strand; PAM type: YTN; PAM sequence: TTC
actacaaatgtaaatgccat

SEQ ID NO: 13320 - DNA, 20 bp, Artificial Sequence
  Description of Artificial Sequence: Synthetic oligonucleotide
  Target: ANGPTL4; (-) strand; PAM type: YTN; PAM sequence: TTT
cactacaaatgtaaatgcca

SEQ ID NO: 13321 - DNA, 20 bp, Artificial Sequence
  Description of Artificial Sequence: Synthetic oligonucleotide
  Target: ANGPTL4; (-) strand; PAM type: YTN; PAM sequence: TTA
tgtgtatttcactacaaatg

SEQ ID NO: 13322 - DNA, 20 bp, Artificial Sequence
  Description of Artificial Sequence: Synthetic oligonucleotide
  Target: ANGPTL4; (-) strand; PAM type: YTN; PAM sequence: CTG
ttatgtgtatttcactacaa

SEQ ID NO: 13323 - DNA, 20 bp, Artificial Sequence
  Description of Artificial Sequence: Synthetic oligonucleotide
  Target: ANGPTL4; (-) strand; PAM type: YTN; PAM sequence: CTG
cgcccagcctgttatgtgta

SEQ ID NO: 13324 - DNA, 20 bp, Artificial Sequence
  Description of Artificial Sequence: Synthetic oligonucleotide
  Target: ANGPTL4; (-) strand; PAM type: YTN; PAM sequence: TTA
caggtatgagccactgcgcc

SEQ ID NO: 13325 - DNA, 20 bp, Artificial Sequence
  Description of Artificial Sequence: Synthetic oligonucleotide
  Target: ANGPTL4; (-) strand; PAM type: YTN; PAM sequence: CTG
ggattacaggtatgagccac

SEQ ID NO: 13326 - DNA, 20 bp, Artificial Sequence
  Description of Artificial Sequence: Synthetic oligonucleotide
  Target: ANGPTL4; (-) strand; PAM type: YTN; PAM sequence: CTC
ccaaagtgctgggattacag

SEQ ID NO: 13327 - DNA, 20 bp, Artificial Sequence
  Description of Artificial Sequence: Synthetic oligonucleotide
  Target: ANGPTL4; (-) strand; PAM type: YTN; PAM sequence: CTC
ggcctcccaaagtgctggga

SEQ ID NO: 13328 - DNA, 20 bp, Artificial Sequence
  Description of Artificial Sequence: Synthetic oligonucleotide
  Target: ANGPTL4; (-) strand; PAM type: YTN; PAM sequence: CTA
cctcggcctcccaaagtgct

SEQ ID NO: 13329 - DNA, 20 bp, Artificial Sequence
  Description of Artificial Sequence: Synthetic oligonucleotide
  Target: ANGPTL4; (-) strand; PAM type: YTN; PAM sequence: CTC
aggtgatccgcctacctcgg

SEQ ID NO: 13330 - DNA, 20 bp, Artificial Sequence
  Description of Artificial Sequence: Synthetic oligonucleotide
  Target: ANGPTL4; (-) strand; PAM type: YTN; PAM sequence: CTG
acctcaggtgatccgcctac

SEQ ID NO: 13331 - DNA, 20 bp, Artificial Sequence
  Description of Artificial Sequence: Synthetic oligonucleotide
  Target: ANGPTL4; (-) strand; PAM type: YTN; PAM sequence: CTC
ctgacctcaggtgatccgcc

SEQ ID NO: 13332 - DNA, 20 bp, Artificial Sequence
  Description of Artificial Sequence: Synthetic oligonucleotide
  Target: ANGPTL4; (-) strand; PAM type: YTN; PAM sequence: CTA
actcctgacctcaggtgatc

SEQ ID NO: 13333 - DNA, 20 bp, Artificial Sequence
  Description of Artificial Sequence: Synthetic oligonucleotide
  Target: ANGPTL4; (-) strand; PAM type: YTN; PAM sequence: CTC
taactcctgacctcaggtga

SEQ ID NO: 13334 - DNA, 20 bp, Artificial Sequence
  Description of Artificial Sequence: Synthetic oligonucleotide
  Target: ANGPTL4; (-) strand; PAM type: YTN; PAM sequence: CTG
gtctctaactcctgacctca

SEQ ID NO: 13335 - DNA, 20 bp, Artificial Sequence
  Description of Artificial Sequence: Synthetic oligonucleotide
  Target: ANGPTL4; (-) strand; PAM type: YTN; PAM sequence: TTC
gccatgtccaggctggtctc

SEQ ID NO: 13336 - DNA, 20 bp, Artificial Sequence
  Description of Artificial Sequence: Synthetic oligonucleotide
  Target: ANGPTL4; (-) strand; PAM type: YTN; PAM sequence: TTT
cgccatgtccaggctggtct

SEQ ID NO: 13337 - DNA, 20 bp, Artificial Sequence
  Description of Artificial Sequence: Synthetic oligonucleotide
  Target: ANGPTL4; (-) strand; PAM type: YTN; PAM sequence: TTA
gtagagacggggtttcgcca

SEQ ID NO: 13338 - DNA, 20 bp, Artificial Sequence
  Description of Artificial Sequence: Synthetic oligonucleotide
  Target: ANGPTL4; (-) strand; PAM type: YTN; PAM sequence: TTT
agtagagacggggtttcgcc

SEQ ID NO: 13339 - DNA, 20 bp, Artificial Sequence
  Description of Artificial Sequence: Synthetic oligonucleotide
  Target: ANGPTL4; (-) strand; PAM type: YTN; PAM sequence: TTT
tagtagagacggggtttcgc

SEQ ID NO: 13340 - DNA, 20 bp, Artificial Sequence
  Description of Artificial Sequence: Synthetic oligonucleotide
  Target: ANGPTL4; (-) strand; PAM type: YTN; PAM sequence: TTG
tattttagtagagacggggt

SEQ ID NO: 13341 - DNA, 20 bp, Artificial Sequence
  Description of Artificial Sequence: Synthetic oligonucleotide
  Target: ANGPTL4; (-) strand; PAM type: YTN; PAM sequence: TTT
gtattttagtagagacgggg

SEQ ID NO: 13342 - DNA, 20 bp, Artificial Sequence
  Description of Artificial Sequence: Synthetic oligonucleotide
  Target: ANGPTL4; (-) strand; PAM type: YTN; PAM sequence: TTT
tgtattttagtagagacggg

SEQ ID NO: 13343 - DNA, 20 bp, Artificial Sequence
  Description of Artificial Sequence: Synthetic oligonucleotide
  Target: ANGPTL4; (-) strand; PAM type: YTN; PAM sequence: TTT
ttgtattttagtagagacgg

SEQ ID NO: 13344 - DNA, 20 bp, Artificial Sequence
  Description of Artificial Sequence: Synthetic oligonucleotide
  Target: ANGPTL4; (-) strand; PAM type: YTN; PAM sequence: CTA
atttttgtattttagtagag

SEQ ID NO: 13345 - DNA, 20 bp, Artificial Sequence
  Description of Artificial Sequence: Synthetic oligonucleotide
  Target: ANGPTL4; (-) strand; PAM type: YTN; PAM sequence: CTG
gctaatttttgtattttagt

SEQ ID NO: 13346 - DNA, 20 bp, Artificial Sequence
  Description of Artificial Sequence: Synthetic oligonucleotide
  Target: ANGPTL4; (-) strand; PAM type: YTN; PAM sequence: TTA
caggtgcccaccaccacgcc

SEQ ID NO: 13347 - DNA, 20 bp, Artificial Sequence
  Description of Artificial Sequence: Synthetic oligonucleotide
  Target: ANGPTL4; (-) strand; PAM type: YTN; PAM sequence: CTG
ggattacaggtgcccaccac

SEQ ID NO: 13348 - DNA, 20 bp, Artificial Sequence
  Description of Artificial Sequence: Synthetic oligonucleotide
  Target: ANGPTL4; (-) strand; PAM type: YTN; PAM sequence: CTC
ccgagtagctgggattacag

SEQ ID NO: 13349 - DNA, 20 bp, Artificial Sequence
  Description of Artificial Sequence: Synthetic oligonucleotide
  Target: ANGPTL4; (-) strand; PAM type: YTN; PAM sequence: CTC
agcctcccgagtagctggga

SEQ ID NO: 13350 - DNA, 20 bp, Artificial Sequence
  Description of Artificial Sequence: Synthetic oligonucleotide
  Target: ANGPTL4; (-) strand; PAM type: YTN; PAM sequence: CTG
cctcagcctcccgagtagct

SEQ ID NO: 13351 - DNA, 20 bp, Artificial Sequence
  Description of Artificial Sequence: Synthetic oligonucleotide
  Target: ANGPTL4; (-) strand; PAM type: YTN; PAM sequence: CTC
ctgcctcagcctcccgagta

SEQ ID NO: 13352 - DNA, 20 bp, Artificial Sequence
  Description of Artificial Sequence: Synthetic oligonucleotide
  Target: ANGPTL4; (-) strand; PAM type: YTN; PAM sequence: TTC
tcctgcctcagcctcccgag

SEQ ID NO: 13353 - DNA, 20 bp, Artificial Sequence
  Description of Artificial Sequence: Synthetic oligonucleotide
  Target: ANGPTL4; (-) strand; PAM type: YTN; PAM sequence: TTC
aaatgattctcctgcctcag

SEQ ID NO: 13354 - DNA, 20 bp, Artificial Sequence
  Description of Artificial Sequence: Synthetic oligonucleotide
  Target: ANGPTL4; (-) strand; PAM type: YTN; PAM sequence: CTG
ggttcaaatgattctcctgc

SEQ ID NO: 13355 - DNA, 20 bp, Artificial Sequence
  Description of Artificial Sequence: Synthetic oligonucleotide
  Target: ANGPTL4; (-) strand; PAM type: YTN; PAM sequence: CTC
ctgggttcaaatgattctcc

SEQ ID NO: 13356 - DNA, 20 bp, Artificial Sequence
  Description of Artificial Sequence: Synthetic oligonucleotide
  Target: ANGPTL4; (-) strand; PAM type: YTN; PAM sequence: TTC
cacctcctgggttcaaatga

SEQ ID NO: 13357 - DNA, 20 bp, Artificial Sequence
  Description of Artificial Sequence: Synthetic oligonucleotide
  Target: ANGPTL4; (-) strand; PAM type: YTN; PAM sequence: CTT
ccacctcctgggttcaaatg

SEQ ID NO: 13358 - DNA, 20 bp, Artificial Sequence
  Description of Artificial Sequence: Synthetic oligonucleotide
  Target: ANGPTL4; (-) strand; PAM type: YTN; PAM sequence: CTG
caacttccacctcctgggtt

SEQ ID NO: 13359 - DNA, 20 bp, Artificial Sequence
  Description of Artificial Sequence: Synthetic oligonucleotide
  Target: ANGPTL4; (-) strand; PAM type: YTN; PAM sequence: CTC
actgcaacttccacctcctg

SEQ ID NO: 13360 - DNA, 20 bp, Artificial Sequence
  Description of Artificial Sequence: Synthetic oligonucleotide
  Target: ANGPTL4; (-) strand; PAM type: YTN; PAM sequence: CTG
ctcactgcaacttccacctc

SEQ ID NO: 13361 - DNA, 20 bp, Artificial Sequence
  Description of Artificial Sequence: Synthetic oligonucleotide
  Target: ANGPTL4; (-) strand; PAM type: YTN; PAM sequence: CTC
tgctcactgcaacttccacc

SEQ ID NO: 13362 - DNA, 20 bp, Artificial Sequence
  Description of Artificial Sequence: Synthetic oligonucleotide
  Target: ANGPTL4; (-) strand; PAM type: YTN; PAM sequence: CTG
gagtgcagtggtgcaatctc

SEQ ID NO: 13363 - DNA, 20 bp, Artificial Sequence
  Description of Artificial Sequence: Synthetic oligonucleotide
  Target: ANGPTL4; (-) strand; PAM type: YTN; PAM sequence: CTG
tcgccaaggctggagtgcag

SEQ ID NO: 13364 - DNA, 20 bp, Artificial Sequence
  Description of Artificial Sequence: Synthetic oligonucleotide
  Target: ANGPTL4; (-) strand; PAM type: YTN; PAM sequence: CTC
tgtcgccaaggctggagtgc

SEQ ID NO: 13365 - DNA, 20 bp, Artificial Sequence
  Description of Artificial Sequence: Synthetic oligonucleotide
  Target: ANGPTL4; (-) strand; PAM type: YTN; PAM sequence: TTG
ctctgtcgccaaggctggag

SEQ ID NO: 13366 - DNA, 20 bp, Artificial Sequence
  Description of Artificial Sequence: Synthetic oligonucleotide
  Target: ANGPTL4; (-) strand; PAM type: YTN; PAM sequence: CTT
gctctgtcgccaaggctgga

SEQ ID NO: 13367 - DNA, 20 bp, Artificial Sequence
  Description of Artificial Sequence: Synthetic oligonucleotide
  Target: ANGPTL4; (-) strand; PAM type: YTN; PAM sequence: TTG
agacagagtcttgctctgtc

SEQ ID NO: 13368 - DNA, 20 bp, Artificial Sequence
  Description of Artificial Sequence: Synthetic oligonucleotide
  Target: ANGPTL4; (-) strand; PAM type: YTN; PAM sequence: TTT
gagacagagtcttgctctgt

SEQ ID NO: 13369 - DNA, 20 bp, Artificial Sequence
  Description of Artificial Sequence: Synthetic oligonucleotide
  Target: ANGPTL4; (-) strand; PAM type: YTN; PAM sequence: TTT
tgagacagagtcttgctctg

SEQ ID NO: 13370 - DNA, 20 bp, Artificial Sequence
  Description of Artificial Sequence: Synthetic oligonucleotide
  Target: ANGPTL4; (-) strand; PAM type: YTN; PAM sequence: TTT
ttgagacagagtcttgctct

SEQ ID NO: 13371 - DNA, 20 bp, Artificial Sequence
  Description of Artificial Sequence: Synthetic oligonucleotide
  Target: ANGPTL4; (-) strand; PAM type: YTN; PAM sequence: TTT
tttgagacagagtcttgctc

SEQ ID NO: 13372 - DNA, 20 bp, Artificial Sequence
  Description of Artificial Sequence: Synthetic oligonucleotide
  Target: ANGPTL4; (-) strand; PAM type: YTN; PAM sequence: TTT
ttttgagacagagtcttgct

SEQ ID NO: 13373 - DNA, 20 bp, Artificial Sequence
  Description of Artificial Sequence: Synthetic oligonucleotide
  Target: ANGPTL4; (-) strand; PAM type: YTN; PAM sequence: TTT
tttttgagacagagtcttgc

SEQ ID NO: 13374 - DNA, 20 bp, Artificial Sequence
  Description of Artificial Sequence: Synthetic oligonucleotide
  Target: ANGPTL4; (-) strand; PAM type: YTN; PAM sequence: CTT
ttttttgagacagagtcttg

SEQ ID NO: 13375 - DNA, 20 bp, Artificial Sequence
  Description of Artificial Sequence: Synthetic oligonucleotide
  Target: ANGPTL4; (-) strand; PAM type: YTN; PAM sequence: TTC
ttttttttgagacagagtct

SEQ ID NO: 13376 - DNA, 20 bp, Artificial Sequence
  Description of Artificial Sequence: Synthetic oligonucleotide
  Target: ANGPTL4; (-) strand; PAM type: YTN; PAM sequence: TTT
cttttttttgagacagagtc

SEQ ID NO: 13377 - DNA, 20 bp, Artificial Sequence
  Description of Artificial Sequence: Synthetic oligonucleotide
  Target: ANGPTL4; (-) strand; PAM type: YTN; PAM sequence: TTT
tcttttttttgagacagagt

SEQ ID NO: 13378 - DNA, 20 bp, Artificial Sequence
  Description of Artificial Sequence: Synthetic oligonucleotide
  Target: ANGPTL4; (-) strand; PAM type: YTN; PAM sequence: TTT
ttcttttttttgagacagag

SEQ ID NO: 13379 - DNA, 20 bp, Artificial Sequence
  Description of Artificial Sequence: Synthetic oligonucleotide
  Target: ANGPTL4; (-) strand; PAM type: YTN; PAM sequence: TTT
tttcttttttttgagacaga

SEQ ID NO: 13380 - DNA, 20 bp, Artificial Sequence
  Description of Artificial Sequence: Synthetic oligonucleotide
  Target: ANGPTL4; (-) strand; PAM type: YTN; PAM sequence: TTT
ttttcttttttttgagacag

SEQ ID NO: 13381 - DNA, 20 bp, Artificial Sequence
  Description of Artificial Sequence: Synthetic oligonucleotide
  Target: ANGPTL4; (-) strand; PAM type: YTN; PAM sequence: TTT
tttttcttttttttgagaca

SEQ ID NO: 13382 - DNA, 20 bp, Artificial Sequence
  Description of Artificial Sequence: Synthetic oligonucleotide
  Target: ANGPTL4; (-) strand; PAM type: YTN; PAM sequence: TTT
ttttttcttttttttgagac

SEQ ID NO: 13383 - DNA, 20 bp, Artificial Sequence
  Description of Artificial Sequence: Synthetic oligonucleotide
  Target: ANGPTL4; (-) strand; PAM type: YTN; PAM sequence: TTT
tttttttcttttttttgaga

SEQ ID NO: 13384 - DNA, 20 bp, Artificial Sequence
  Description of Artificial Sequence: Synthetic oligonucleotide
  Target: ANGPTL4; (-) strand; PAM type: YTN; PAM sequence: CTT
ttttttttcttttttttgag

SEQ ID NO: 13385 - DNA, 20 bp, Artificial Sequence
  Description of Artificial Sequence: Synthetic oligonucleotide
  Target: ANGPTL4; (-) strand; PAM type: YTN; PAM sequence: TTC
ttttttttttcttttttttg

SEQ ID NO: 13386 - DNA, 20 bp, Artificial Sequence
  Description of Artificial Sequence: Synthetic oligonucleotide
  Target: ANGPTL4; (-) strand; PAM type: YTN; PAM sequence: TTT
cttttttttttctttttttt

SEQ ID NO: 13387 - DNA, 20 bp, Artificial Sequence
  Description of Artificial Sequence: Synthetic oligonucleotide
  Target: ANGPTL4; (-) strand; PAM type: YTN; PAM sequence: TTT
tcttttttttttcttttttt

SEQ ID NO: 13388 - DNA, 20 bp, Artificial Sequence
  Description of Artificial Sequence: Synthetic oligonucleotide
  Target: ANGPTL4; (-) strand; PAM type: YTN; PAM sequence: CTT
ttcttttttttttctttttt

SEQ ID NO: 13389 - DNA, 20 bp, Artificial Sequence
  Description of Artificial Sequence: Synthetic oligonucleotide
  Target: ANGPTL4; (-) strand; PAM type: YTN; PAM sequence: TTC
ttttcttttttttttctttt

SEQ ID NO: 13390 - DNA, 20 bp, Artificial Sequence
  Description of Artificial Sequence: Synthetic oligonucleotide
  Target: ANGPTL4; (-) strand; PAM type: YTN; PAM sequence: TTT
cttttcttttttttttcttt

SEQ ID NO: 13391 - DNA, 20 bp, Artificial Sequence
  Description of Artificial Sequence: Synthetic oligonucleotide
  Target: ANGPTL4; (-) strand; PAM type: YTN; PAM sequence: TTT
tcttttcttttttttttctt

SEQ ID NO: 13392 - DNA, 20 bp, Artificial Sequence
  Description of Artificial Sequence: Synthetic oligonucleotide
  Target: ANGPTL4; (-) strand; PAM type: YTN; PAM sequence: CTT
ttcttttcttttttttttct

SEQ ID NO: 13393 - DNA, 20 bp, Artificial Sequence
  Description of Artificial Sequence: Synthetic oligonucleotide
  Target: ANGPTL4; (-) strand; PAM type: YTN; PAM sequence: TTC
ttttcttttctttttttttt

SEQ ID NO: 13394 - DNA, 20 bp, Artificial Sequence
  Description of Artificial Sequence: Synthetic oligonucleotide
  Target: ANGPTL4; (-) strand; PAM type: YTN; PAM sequence: TTT
cttttcttttcttttttttt

SEQ ID NO: 13395 - DNA, 20 bp, Artificial Sequence
  Description of Artificial Sequence: Synthetic oligonucleotide
  Target: ANGPTL4; (-) strand; PAM type: YTN; PAM sequence: TTT
tcttttcttttctttttttt

SEQ ID NO: 13396 - DNA, 20 bp, Artificial Sequence
  Description of Artificial Sequence: Synthetic oligonucleotide
  Target: ANGPTL4; (-) strand; PAM type: YTN; PAM sequence: TTT
ttcttttcttttcttttttt

SEQ ID NO: 13397 - DNA, 20 bp, Artificial Sequence
  Description of Artificial Sequence: Synthetic oligonucleotide
  Target: ANGPTL4; (-) strand; PAM type: YTN; PAM sequence: TTT
tttcttttcttttctttttt

SEQ ID NO: 13398 - DNA, 20 bp, Artificial Sequence
  Description of Artificial Sequence: Synthetic oligonucleotide
  Target: ANGPTL4; (-) strand; PAM type: YTN; PAM sequence: TTT
ttttcttttcttttcttttt

SEQ ID NO: 13399 - DNA, 20 bp, Artificial Sequence
  Description of Artificial Sequence: Synthetic oligonucleotide
  Target: ANGPTL4; (-) strand; PAM type: YTN; PAM sequence: TTT
tttttcttttcttttctttt

SEQ ID NO: 13400 - DNA, 20 bp, Artificial Sequence
  Description of Artificial Sequence: Synthetic oligonucleotide
  Target: ANGPTL4; (-) strand; PAM type: YTN; PAM sequence: CTT
ttttttcttttcttttcttt

SEQ ID NO: 13401 - DNA, 20 bp, Artificial Sequence
  Description of Artificial Sequence: Synthetic oligonucleotide
  Target: ANGPTL4; (-) strand; PAM type: YTN; PAM sequence: TTC
ttttttttcttttcttttct

SEQ ID NO: 13402 - DNA, 20 bp, Artificial Sequence
  Description of Artificial Sequence: Synthetic oligonucleotide
  Target: ANGPTL4; (-) strand; PAM type: YTN; PAM sequence: TTT
cttttttttcttttcttttc

SEQ ID NO: 13403 - DNA, 20 bp, Artificial Sequence
  Description of Artificial Sequence: Synthetic oligonucleotide
  Target: ANGPTL4; (-) strand; PAM type: YTN; PAM sequence: TTT
tcttttttttcttttctttt

SEQ ID NO: 13404 - DNA, 20 bp, Artificial Sequence
  Description of Artificial Sequence: Synthetic oligonucleotide
  Target: ANGPTL4; (-) strand; PAM type: YTN; PAM sequence: TTT
ttcttttttttcttttcttt

SEQ ID NO: 13405 - DNA, 20 bp, Artificial Sequence
  Description of Artificial Sequence: Synthetic oligonucleotide
  Target: ANGPTL4; (-) strand; PAM type: YTN; PAM sequence: CTT
tttcttttttttcttttctt

SEQ ID NO: 13406 - DNA, 20 bp, Artificial Sequence
  Description of Artificial Sequence: Synthetic oligonucleotide
  Target: ANGPTL4; (-) strand; PAM type: YTN; PAM sequence: TTC
tttttcttttttttcttttc

SEQ ID NO: 13407 - DNA, 20 bp, Artificial Sequence
  Description of Artificial Sequence: Synthetic oligonucleotide
  Target: ANGPTL4; (-) strand; PAM type: YTN; PAM sequence: TTT
ctttttcttttttttctttt

SEQ ID NO: 13408 - DNA, 20 bp, Artificial Sequence
  Description of Artificial Sequence: Synthetic oligonucleotide
  Target: ANGPTL4; (-) strand; PAM type: YTN; PAM sequence: TTT
tctttttcttttttttcttt

SEQ ID NO: 13409 - DNA, 20 bp, Artificial Sequence
  Description of Artificial Sequence: Synthetic oligonucleotide
  Target: ANGPTL4; (-) strand; PAM type: YTN; PAM sequence: TTT
ttctttttcttttttttctt

SEQ ID NO: 13410 - DNA, 20 bp, Artificial Sequence
  Description of Artificial Sequence: Synthetic oligonucleotide
  Target: ANGPTL4; (-) strand; PAM type: YTN; PAM sequence: TTT
tttctttttcttttttttct

SEQ ID NO: 13411 - DNA, 20 bp, Artificial Sequence
  Description of Artificial Sequence: Synthetic oligonucleotide
  Target: ANGPTL4; (-) strand; PAM type: YTN; PAM sequence: TTT
ttttctttttcttttttttc

SEQ ID NO: 13412 - DNA, 20 bp, Artificial Sequence
  Description of Artificial Sequence: Synthetic oligonucleotide
  Target: ANGPTL4; (-) strand; PAM type: YTN; PAM sequence: CTT
tttttctttttctttttttt

SEQ ID NO: 13413 - DNA, 20 bp, Artificial Sequence
  Description of Artificial Sequence: Synthetic oligonucleotide
  Target: ANGPTL4; (-) strand; PAM type: YTN; PAM sequence: TTC
tttttttctttttctttttt

SEQ ID NO: 13414 - DNA, 20 bp, Artificial Sequence
  Description of Artificial Sequence: Synthetic oligonucleotide
  Target: ANGPTL4; (-) strand; PAM type: YTN; PAM sequence: TTT
ctttttttctttttcttttt

SEQ ID NO: 13415 - DNA, 20 bp, Artificial Sequence
  Description of Artificial Sequence: Synthetic oligonucleotide
  Target: ANGPTL4; (-) strand; PAM type: YTN; PAM sequence: TTA
tgtatatttctttttttctt

SEQ ID NO: 13416 - DNA, 20 bp, Artificial Sequence
  Description of Artificial Sequence: Synthetic oligonucleotide
  Target: ANGPTL4; (-) strand; PAM type: YTN; PAM sequence: TTA
tattatgtatatttcttttt

SEQ ID NO: 13417 - DNA, 20 bp, Artificial Sequence
  Description of Artificial Sequence: Synthetic oligonucleotide
  Target: ANGPTL4; (-) strand; PAM type: YTN; PAM sequence: TTT
atattatgtatatttctttt

SEQ ID NO: 13418 - DNA, 20 bp, Artificial Sequence
  Description of Artificial Sequence: Synthetic oligonucleotide
  Target: ANGPTL4; (-) strand; PAM type: YTN; PAM sequence: TTT
tatattatgtatatttcttt

SEQ ID NO: 13419 - DNA, 20 bp, Artificial Sequence
  Description of Artificial Sequence: Synthetic oligonucleotide
  Target: ANGPTL4; (-) strand; PAM type: YTN; PAM sequence: TTA
aaatgaccaattttatatta

SEQ ID NO: 13420 - DNA, 20 bp, Artificial Sequence
  Description of Artificial Sequence: Synthetic oligonucleotide
  Target: ANGPTL4; (-) strand; PAM type: YTN; PAM sequence: TTG
ttaaaatgaccaattttata

SEQ ID NO: 13421 - DNA, 20 bp, Artificial Sequence
  Description of Artificial Sequence: Synthetic oligonucleotide
  Target: ANGPTL4; (-) strand; PAM type: YTN; PAM sequence: TTA
aaaattgttaaaatgaccaa

SEQ ID NO: 13422 - DNA, 20 bp, Artificial Sequence
  Description of Artificial Sequence: Synthetic oligonucleotide
  Target: ANGPTL4; (-) strand; PAM type: YTN; PAM sequence: TTG
gccaacatagttaaaaattg

SEQ ID NO: 13423 - DNA, 20 bp, Artificial Sequence
  Description of Artificial Sequence: Synthetic oligonucleotide
  Target: ANGPTL4; (-) strand; PAM type: YTN; PAM sequence: TTT
ggccaacatagttaaaaatt

SEQ ID NO: 13424 - DNA, 20 bp, Artificial Sequence
  Description of Artificial Sequence: Synthetic oligonucleotide
  Target: ANGPTL4; (-) strand; PAM type: YTN; PAM sequence: CTT
tggccaacatagttaaaaat

SEQ ID NO: 13425 - DNA, 20 bp, Artificial Sequence
  Description of Artificial Sequence: Synthetic oligonucleotide
  Target: ANGPTL4; (-) strand; PAM type: YTN; PAM sequence: CTA
ctttggccaacatagttaaa

SEQ ID NO: 13426 - DNA, 20 bp, Artificial Sequence
  Description of Artificial Sequence: Synthetic oligonucleotide
  Target: ANGPTL4; (-) strand; PAM type: YTN; PAM sequence: CTC
caatcccaacgcgtgggcta

SEQ ID NO: 13427 - DNA, 20 bp, Artificial Sequence
  Description of Artificial Sequence: Synthetic oligonucleotide
  Target: ANGPTL4; (-) strand; PAM type: YTN; PAM sequence: CTG
gggcgatcacggtgggcaag

SEQ ID NO: 13428 - DNA, 20 bp, Artificial Sequence
  Description of Artificial Sequence: Synthetic oligonucleotide
  Target: ANGPTL4; (-) strand; PAM type: YTN; PAM sequence: CTG
tactggggcgatcacggtgg

SEQ ID NO: 13429 - DNA, 20 bp, Artificial Sequence
  Description of Artificial Sequence: Synthetic oligonucleotide
  Target: ANGPTL4; (-) strand; PAM type: YTN; PAM sequence: CTA
tatgccaggcactgtactgg

SEQ ID NO: 13430 - DNA, 20 bp, Artificial Sequence
  Description of Artificial Sequence: Synthetic oligonucleotide
  Target: ANGPTL4; (-) strand; PAM type: YTN; PAM sequence: CTA
ctatatgccaggcactgtac

SEQ ID NO: 13431 - DNA, 20 bp, Artificial Sequence
  Description of Artificial Sequence: Synthetic oligonucleotide
  Target: ANGPTL4; (-) strand; PAM type: YTN; PAM sequence: CTG
gagcacctactatatgccag

SEQ ID NO: 13432 - DNA, 20 bp, Artificial Sequence
  Description of Artificial Sequence: Synthetic oligonucleotide
  Target: ANGPTL4; (-) strand; PAM type: YTN; PAM sequence: TTC
ctggagcacctactatatgc

SEQ ID NO: 13433 - DNA, 20 bp, Artificial Sequence
  Description of Artificial Sequence: Synthetic oligonucleotide
  Target: ANGPTL4; (-) strand; PAM type: YTN; PAM sequence: TTG
ttcctggagcacctactata

SEQ ID NO: 13434 - DNA, 20 bp, Artificial Sequence
  Description of Artificial Sequence: Synthetic oligonucleotide
  Target: ANGPTL4; (-) strand; PAM type: YTN; PAM sequence: CTG
atcaattgttcctggagcac

SEQ ID NO: 13435 - DNA, 20 bp, Artificial Sequence
  Description of Artificial Sequence: Synthetic oligonucleotide
  Target: ANGPTL4; (-) strand; PAM type: YTN; PAM sequence: TTA
cccagcaaagacaaagtcat

SEQ ID NO: 13436 - DNA, 20 bp, Artificial Sequence
  Description of Artificial Sequence: Synthetic oligonucleotide
  Target: ANGPTL4; (-) strand; PAM type: YTN; PAM sequence: CTT
acccagcaaagacaaagtca

SEQ ID NO: 13437 - DNA, 20 bp, Artificial Sequence
  Description of Artificial Sequence: Synthetic oligonucleotide
  Target: ANGPTL4; (-) strand; PAM type: YTN; PAM sequence: CTC
ttacccagcaaagacaaagt

SEQ ID NO: 13438 - DNA, 20 bp, Artificial Sequence
  Description of Artificial Sequence: Synthetic oligonucleotide
  Target: ANGPTL4; (-) strand; PAM type: YTN; PAM sequence: TTA
gaatgtggcctcttacccag

SEQ ID NO: 13439 - DNA, 20 bp, Artificial Sequence
  Description of Artificial Sequence: Synthetic oligonucleotide
  Target: ANGPTL4; (-) strand; PAM type: YTN; PAM sequence: TTT
agaatgtggcctcttaccca

SEQ ID NO: 13440 - DNA, 20 bp, Artificial Sequence
  Description of Artificial Sequence: Synthetic oligonucleotide
  Target: ANGPTL4; (-) strand; PAM type: YTN; PAM sequence: CTT
tagaatgtggcctcttaccc

SEQ ID NO: 13441 - DNA, 20 bp, Artificial Sequence
  Description of Artificial Sequence: Synthetic oligonucleotide
  Target: ANGPTL4; (-) strand; PAM type: YTN; PAM sequence: CTG
acctttagaatgtggcctct

SEQ ID NO: 13442 - DNA, 20 bp, Artificial Sequence
  Description of Artificial Sequence: Synthetic oligonucleotide
  Target: ANGPTL4; (-) strand; PAM type: YTN; PAM sequence: CTG
gccaaaaactgacctttaga

SEQ ID NO: 13443 - DNA, 20 bp, Artificial Sequence
  Description of Artificial Sequence: Synthetic oligonucleotide
  Target: ANGPTL4; (-) strand; PAM type: YTN; PAM sequence: CTG
tgcctggccaaaaactgacc

SEQ ID NO: 13444 - DNA, 20 bp, Artificial Sequence
  Description of Artificial Sequence: Synthetic oligonucleotide
  Target: ANGPTL4; (-) strand; PAM type: YTN; PAM sequence: CTG
ggatgacaggtgtgagtcac

SEQ ID NO: 13445 - DNA, 20 bp, Artificial Sequence
  Description of Artificial Sequence: Synthetic oligonucleotide
  Target: ANGPTL4; (-) strand; PAM type: YTN; PAM sequence: CTC
ccaaagtgctgggatgacag

SEQ ID NO: 13446 - DNA, 20 bp, Artificial Sequence
  Description of Artificial Sequence: Synthetic oligonucleotide
  Target: ANGPTL4; (-) strand; PAM type: YTN; PAM sequence: CTC
ggcctcccaaagtgctggga

SEQ ID NO: 13447 - DNA, 20 bp, Artificial Sequence
  Description of Artificial Sequence: Synthetic oligonucleotide
  Target: ANGPTL4; (-) strand; PAM type: YTN; PAM sequence: CTC
gcctcggcctcccaaagtgc

SEQ ID NO: 13448 - DNA, 20 bp, Artificial Sequence
  Description of Artificial Sequence: Synthetic oligonucleotide
  Target: ANGPTL4; (-) strand; PAM type: YTN; PAM sequence: TTC
actcgcctcggcctcccaaa

SEQ ID NO: 13449 - DNA, 20 bp, Artificial Sequence
  Description of Artificial Sequence: Synthetic oligonucleotide
  Target: ANGPTL4; (-) strand; PAM type: YTN; PAM sequence: CTC
aagggattcactcgcctcgg

SEQ ID NO: 13450 - DNA, 20 bp, Artificial Sequence
  Description of Artificial Sequence: Synthetic oligonucleotide
  Target: ANGPTL4; (-) strand; PAM type: YTN; PAM sequence: CTG
agctcaagggattcactcgc

SEQ ID NO: 13451 - DNA, 20 bp, Artificial Sequence
  Description of Artificial Sequence: Synthetic oligonucleotide
  Target: ANGPTL4; (-) strand; PAM type: YTN; PAM sequence: CTC
ctgagctcaagggattcact

SEQ ID NO: 13452 - DNA, 20 bp, Artificial Sequence
  Description of Artificial Sequence: Synthetic oligonucleotide
  Target: ANGPTL4; (-) strand; PAM type: YTN; PAM sequence: TTG
aactcctgagctcaagggat

SEQ ID NO: 13453 - DNA, 20 bp, Artificial Sequence
  Description of Artificial Sequence: Synthetic oligonucleotide
  Target: ANGPTL4; (-) strand; PAM type: YTN; PAM sequence: CTT
gaactcctgagctcaaggga

SEQ ID NO: 13454 - DNA, 20 bp, Artificial Sequence
  Description of Artificial Sequence: Synthetic oligonucleotide
  Target: ANGPTL4; (-) strand; PAM type: YTN; PAM sequence: CTG
gtcttgaactcctgagctca

SEQ ID NO: 13455 - DNA, 20 bp, Artificial Sequence
  Description of Artificial Sequence: Synthetic oligonucleotide
  Target: ANGPTL4; (-) strand; PAM type: YTN; PAM sequence: TTG
cccaggctggtcttgaactc

SEQ ID NO: 13456 - DNA, 20 bp, Artificial Sequence
  Description of Artificial Sequence: Synthetic oligonucleotide
  Target: ANGPTL4; (-) strand; PAM type: YTN; PAM sequence: TTG
ccgtgttgcccaggctggtc

SEQ ID NO: 13457 - DNA, 20 bp, Artificial Sequence
  Description of Artificial Sequence: Synthetic oligonucleotide
  Target: ANGPTL4; (-) strand; PAM type: YTN; PAM sequence: TTT
gccgtgttgcccaggctggt

SEQ ID NO: 13458 - DNA, 20 bp, Artificial Sequence
  Description of Artificial Sequence: Synthetic oligonucleotide
  Target: ANGPTL4; (-) strand; PAM type: YTN; PAM sequence: TTT
tgccgtgttgcccaggctgg

SEQ ID NO: 13459 - DNA, 20 bp, Artificial Sequence
  Description of Artificial Sequence: Synthetic oligonucleotide
  Target: ANGPTL4; (-) strand; PAM type: YTN; PAM sequence: TTT
ttgccgtgttgcccaggctg

SEQ ID NO: 13460 - DNA, 20 bp, Artificial Sequence
  Description of Artificial Sequence: Synthetic oligonucleotide
  Target: ANGPTL4; (-) strand; PAM type: YTN; PAM sequence: TTG
tagagacaggatttttgccg

SEQ ID NO: 13461 - DNA, 20 bp, Artificial Sequence
  Description of Artificial Sequence: Synthetic oligonucleotide
  Target: ANGPTL4; (-) strand; PAM type: YTN; PAM sequence: TTT
gtagagacaggatttttgcc

SEQ ID NO: 13462 - DNA, 20 bp, Artificial Sequence
  Description of Artificial Sequence: Synthetic oligonucleotide
  Target: ANGPTL4; (-) strand; PAM type: YTN; PAM sequence: TTT
tgtagagacaggatttttgc

SEQ ID NO: 13463 - DNA, 20 bp, Artificial Sequence
  Description of Artificial Sequence: Synthetic oligonucleotide
  Target: ANGPTL4; (-) strand; PAM type: YTN; PAM sequence: CTG
tagattttgtagagacagga

SEQ ID NO: 13464 - DNA, 20 bp, Artificial Sequence
  Description of Artificial Sequence: Synthetic oligonucleotide
  Target: ANGPTL4; (-) strand; PAM type: YTN; PAM sequence: TTC
tgtagattttgtagagacag

SEQ ID NO: 13465 - DNA, 20 bp, Artificial Sequence
  Description of Artificial Sequence: Synthetic oligonucleotide
  Target: ANGPTL4; (-) strand; PAM type: YTN; PAM sequence: TTT
ctgtagattttgtagagaca

SEQ ID NO: 13466 - DNA, 20 bp, Artificial Sequence
  Description of Artificial Sequence: Synthetic oligonucleotide
  Target: ANGPTL4; (-) strand; PAM type: YTN; PAM sequence: CTA
atttctgtagattttgtaga

SEQ ID NO: 13467 - DNA, 20 bp, Artificial Sequence
  Description of Artificial Sequence: Synthetic oligonucleotide
  Target: ANGPTL4; (-) strand; PAM type: YTN; PAM sequence: CTG
cctaatttctgtagattttg

SEQ ID NO: 13468 - DNA, 20 bp, Artificial Sequence
  Description of Artificial Sequence: Synthetic oligonucleotide
  Target: ANGPTL4; (-) strand; PAM type: YTN; PAM sequence: CTA
taggcatgtgccaccagacc

SEQ ID NO: 13469 - DNA, 20 bp, Artificial Sequence
  Description of Artificial Sequence: Synthetic oligonucleotide
  Target: ANGPTL4; (-) strand; PAM type: YTN; PAM sequence: CTG
ggactataggcatgtgccac

SEQ ID NO: 13470 - DNA, 20 bp, Artificial Sequence
  Description of Artificial Sequence: Synthetic oligonucleotide
  Target: ANGPTL4; (-) strand; PAM type: YTN; PAM sequence: CTC
ccaagcagctgggactatag

SEQ ID NO: 13471 - DNA, 20 bp, Artificial Sequence
  Description of Artificial Sequence: Synthetic oligonucleotide
  Target: ANGPTL4; (-) strand; PAM type: YTN; PAM sequence: CTC
agcctcccaagcagctggga

SEQ ID NO: 13472 - DNA, 20 bp, Artificial Sequence
  Description of Artificial Sequence: Synthetic oligonucleotide
  Target: ANGPTL4; (-) strand; PAM type: YTN; PAM sequence: CTC
ccacctcagcctcccaagca

SEQ ID NO: 13473 - DNA, 20 bp, Artificial Sequence
  Description of Artificial Sequence: Synthetic oligonucleotide
  Target: ANGPTL4; (-) strand; PAM type: YTN; PAM sequence: CTC
aagtgatcctcccacctcag

SEQ ID NO: 13474 - DNA, 20 bp, Artificial Sequence
  Description of Artificial Sequence: Synthetic oligonucleotide
  Target: ANGPTL4; (-) strand; PAM type: YTN; PAM sequence: CTC
ccaggctcaagtgatcctcc

SEQ ID NO: 13475 - DNA, 20 bp, Artificial Sequence
  Description of Artificial Sequence: Synthetic oligonucleotide
  Target: ANGPTL4; (-) strand; PAM type: YTN; PAM sequence: CTC
aaactcccaggctcaagtga

SEQ ID NO: 13476 - DNA, 20 bp, Artificial Sequence
  Description of Artificial Sequence: Synthetic oligonucleotide
  Target: ANGPTL4; (-) strand; PAM type: YTN; PAM sequence: CTC
accgcaacctcaaactccca

SEQ ID NO: 13477 - DNA, 20 bp, Artificial Sequence
  Description of Artificial Sequence: Synthetic oligonucleotide
  Target: ANGPTL4; (-) strand; PAM type: YTN; PAM sequence: CTG
gagtgcagtgtcacaatcac

SEQ ID NO: 13478 - DNA, 20 bp, Artificial Sequence
  Description of Artificial Sequence: Synthetic oligonucleotide
  Target: ANGPTL4; (-) strand; PAM type: YTN; PAM sequence: CTC
acccaggctggagtgcagtg

SEQ ID NO: 13479 - DNA, 20 bp, Artificial Sequence
  Description of Artificial Sequence: Synthetic oligonucleotide
  Target: ANGPTL4; (-) strand; PAM type: YTN; PAM sequence: CTC
actcacccaggctggagtgc

SEQ ID NO: 13480 - DNA, 20 bp, Artificial Sequence
  Description of Artificial Sequence: Synthetic oligonucleotide
  Target: ANGPTL4; (-) strand; PAM type: YTN; PAM sequence: CTG
agatgggtctcactcaccca

SEQ ID NO: 13481 - DNA, 20 bp, Artificial Sequence
  Description of Artificial Sequence: Synthetic oligonucleotide
  Target: ANGPTL4; (-) strand; PAM type: YTN; PAM sequence: TTC
tgagatgggtctcactcacc

SEQ ID NO: 13482 - DNA, 20 bp, Artificial Sequence
  Description of Artificial Sequence: Synthetic oligonucleotide
  Target: ANGPTL4; (-) strand; PAM type: YTN; PAM sequence: TTT
ctgagatgggtctcactcac

SEQ ID NO: 13483 - DNA, 20 bp, Artificial Sequence
  Description of Artificial Sequence: Synthetic oligonucleotide
  Target: ANGPTL4; (-) strand; PAM type: YTN; PAM sequence: TTT
tctgagatgggtctcactca

SEQ ID NO: 13484 - DNA, 20 bp, Artificial Sequence
  Description of Artificial Sequence: Synthetic oligonucleotide
  Target: ANGPTL4; (-) strand; PAM type: YTN; PAM sequence: TTT
ttctgagatgggtctcactc

SEQ ID NO: 13485 - DNA, 20 bp, Artificial Sequence
  Description of Artificial Sequence: Synthetic oligonucleotide
  Target: ANGPTL4; (-) strand; PAM type: YTN; PAM sequence: TTT
tttctgagatgggtctcact

SEQ ID NO: 13486 - DNA, 20 bp, Artificial Sequence
  Description of Artificial Sequence: Synthetic oligonucleotide
  Target: ANGPTL4; (-) strand; PAM type: YTN; PAM sequence: TTT
ttttctgagatgggtctcac

SEQ ID NO: 13487 - DNA, 20 bp, Artificial Sequence
  Description of Artificial Sequence: Synthetic oligonucleotide
  Target: ANGPTL4; (-) strand; PAM type: YTN; PAM sequence: TTT
tttttctgagatgggtctca

SEQ ID NO: 13488 - DNA, 20 bp, Artificial Sequence
  Description of Artificial Sequence: Synthetic oligonucleotide
  Target: ANGPTL4; (-) strand; PAM type: YTN; PAM sequence: TTT
ttttttctgagatgggtctc

SEQ ID NO: 13489 - DNA, 20 bp, Artificial Sequence
  Description of Artificial Sequence: Synthetic oligonucleotide
  Target: ANGPTL4; (-) strand; PAM type: YTN; PAM sequence: TTT
tttttttctgagatgggtct

SEQ ID NO: 13490 - DNA, 20 bp, Artificial Sequence
  Description of Artificial Sequence: Synthetic oligonucleotide
  Target: ANGPTL4; (-) strand; PAM type: YTN; PAM sequence: TTT
ttttttttctgagatgggtc

SEQ ID NO: 13491 - DNA, 20 bp, Artificial Sequence
  Description of Artificial Sequence: Synthetic oligonucleotide
  Target: ANGPTL4; (-) strand; PAM type: YTN; PAM sequence: TTT
tttttttttctgagatgggt

SEQ ID NO: 13492 - DNA, 20 bp, Artificial Sequence
  Description of Artificial Sequence: Synthetic oligonucleotide
  Target: ANGPTL4; (-) strand; PAM type: YTN; PAM sequence: TTT
ttttttttttctgagatggg

SEQ ID NO: 13493 - DNA, 20 bp, Artificial Sequence
  Description of Artificial Sequence: Synthetic oligonucleotide
  Target: ANGPTL4; (-) strand; PAM type: YTN; PAM sequence: TTT
tttttttttttctgagatgg

SEQ ID NO: 13494 - DNA, 20 bp, Artificial Sequence
  Description of Artificial Sequence: Synthetic oligonucleotide
  Target: ANGPTL4; (-) strand; PAM type: YTN; PAM sequence: TTT
ttttttttttttctgagatg

SEQ ID NO: 13495 - DNA, 20 bp, Artificial Sequence
  Description of Artificial Sequence: Synthetic oligonucleotide
  Target: ANGPTL4; (-) strand; PAM type: YTN; PAM sequence: TTA
tgtatttttttttttttttc

SEQ ID NO: 13496 - DNA, 20 bp, Artificial Sequence
  Description of Artificial Sequence: Synthetic oligonucleotide
  Target: ANGPTL4; (-) strand; PAM type: YTN; PAM sequence: TTT
atgtattttttttttttttt

SEQ ID NO: 13497 - DNA, 20 bp, Artificial Sequence
  Description of Artificial Sequence: Synthetic oligonucleotide
  Target: ANGPTL4; (-) strand; PAM type: YTN; PAM sequence: TTT
tatgtatttttttttttttt

SEQ ID NO: 13498 - DNA, 20 bp, Artificial Sequence
  Description of Artificial Sequence: Synthetic oligonucleotide
  Target: ANGPTL4; (-) strand; PAM type: YTN; PAM sequence: CTG
ttttatgtattttttttttt

SEQ ID NO: 13499 - DNA, 20 bp, Artificial Sequence
  Description of Artificial Sequence: Synthetic oligonucleotide
  Target: ANGPTL4; (-) strand; PAM type: YTN; PAM sequence: TTA
caggcatgagccaccacgcc

SEQ ID NO: 13500 - DNA, 20 bp, Artificial Sequence
  Description of Artificial Sequence: Synthetic oligonucleotide
  Target: ANGPTL4; (-) strand; PAM type: YTN; PAM sequence: CTA
ggattacaggcatgagccac

SEQ ID NO: 13501 - DNA, 20 bp, Artificial Sequence
  Description of Artificial Sequence: Synthetic oligonucleotide
  Target: ANGPTL4; (-) strand; PAM type: YTN; PAM sequence: CTC
ccaaagtgctaggattacag

SEQ ID NO: 13502 - DNA, 20 bp, Artificial Sequence
  Description of Artificial Sequence: Synthetic oligonucleotide
  Target: ANGPTL4; (-) strand; PAM type: YTN; PAM sequence: CTC
agcctcccaaagtgctagga

SEQ ID NO: 13503 - DNA, 20 bp, Artificial Sequence
  Description of Artificial Sequence: Synthetic oligonucleotide
  Target: ANGPTL4; (-) strand; PAM type: YTN; PAM sequence: CTA
tccaccacctcagcctccca

SEQ ID NO: 13504 - DNA, 20 bp, Artificial Sequence
  Description of Artificial Sequence: Synthetic oligonucleotide
  Target: ANGPTL4; (-) strand; PAM type: YTN; PAM sequence: TTA
ggctatccaccacctcagcc

SEQ ID NO: 13505 - DNA, 20 bp, Artificial Sequence
  Description of Artificial Sequence: Synthetic oligonucleotide
  Target: ANGPTL4; (-) strand; PAM type: YTN; PAM sequence: CTT
aggctatccaccacctcagc

SEQ ID NO: 13506 - DNA, 20 bp, Artificial Sequence
  Description of Artificial Sequence: Synthetic oligonucleotide
  Target: ANGPTL4; (-) strand; PAM type: YTN; PAM sequence: CTA
agcttaggctatccaccacc

SEQ ID NO: 13507 - DNA, 20 bp, Artificial Sequence
  Description of Artificial Sequence: Synthetic oligonucleotide
  Target: ANGPTL4; (-) strand; PAM type: YTN; PAM sequence: CTC
ctaagcttaggctatccacc

SEQ ID NO: 13508 - DNA, 20 bp, Artificial Sequence
  Description of Artificial Sequence: Synthetic oligonucleotide
  Target: ANGPTL4; (-) strand; PAM type: YTN; PAM sequence: CTC
aaactcctaagcttaggcta

SEQ ID NO: 13509 - DNA, 20 bp, Artificial Sequence
  Description of Artificial Sequence: Synthetic oligonucleotide
  Target: ANGPTL4; (-) strand; PAM type: YTN; PAM sequence: CTG
gtctcaaactcctaagctta

SEQ ID NO: 13510 - DNA, 20 bp, Artificial Sequence
  Description of Artificial Sequence: Synthetic oligonucleotide
  Target: ANGPTL4; (-) strand; PAM type: YTN; PAM sequence: TTG
cccaggctggtctcaaactc

SEQ ID NO: 13511 - DNA, 20 bp, Artificial Sequence
  Description of Artificial Sequence: Synthetic oligonucleotide
  Target: ANGPTL4; (-) strand; PAM type: YTN; PAM sequence: TTC
gccatgttgcccaggctggt

SEQ ID NO: 13512 - DNA, 20 bp, Artificial Sequence
  Description of Artificial Sequence: Synthetic oligonucleotide
  Target: ANGPTL4; (-) strand; PAM type: YTN; PAM sequence: TTT
cgccatgttgcccaggctgg

SEQ ID NO: 13513 - DNA, 20 bp, Artificial Sequence
  Description of Artificial Sequence: Synthetic oligonucleotide
  Target: ANGPTL4; (-) strand; PAM type: YTN; PAM sequence: CTA
gtagagggggtggggtttcg

SEQ ID NO: 13514 - DNA, 20 bp, Artificial Sequence
  Description of Artificial Sequence: Synthetic oligonucleotide
  Target: ANGPTL4; (-) strand; PAM type: YTN; PAM sequence: TTC
tagtagagggggtggggttt

SEQ ID NO: 13515 - DNA, 20 bp, Artificial Sequence
  Description of Artificial Sequence: Synthetic oligonucleotide
  Target: ANGPTL4; (-) strand; PAM type: YTN; PAM sequence: TTG
tattctagtagagggggtgg

SEQ ID NO: 13516 - DNA, 20 bp, Artificial Sequence
  Description of Artificial Sequence: Synthetic oligonucleotide
  Target: ANGPTL4; (-) strand; PAM type: YTN; PAM sequence: TTT
gtattctagtagagggggtg

SEQ ID NO: 13517 - DNA, 20 bp, Artificial Sequence
  Description of Artificial Sequence: Synthetic oligonucleotide
  Target: ANGPTL4; (-) strand; PAM type: YTN; PAM sequence: TTT
tgtattctagtagagggggt

SEQ ID NO: 13518 - DNA, 20 bp, Artificial Sequence
  Description of Artificial Sequence: Synthetic oligonucleotide
  Target: ANGPTL4; (-) strand; PAM type: YTN; PAM sequence: TTT
ttgtattctagtagaggggg

SEQ ID NO: 13519 - DNA, 20 bp, Artificial Sequence
  Description of Artificial Sequence: Synthetic oligonucleotide
  Target: ANGPTL4; (-) strand; PAM type: YTN; PAM sequence: TTT
tttgtattctagtagagggg

SEQ ID NO: 13520 - DNA, 20 bp, Artificial Sequence
  Description of Artificial Sequence: Synthetic oligonucleotide
  Target: ANGPTL4; (-) strand; PAM type: YTN; PAM sequence: CTA
attttttgtattctagtaga

SEQ ID NO: 13521 - DNA, 20 bp, Artificial Sequence
  Description of Artificial Sequence: Synthetic oligonucleotide
  Target: ANGPTL4; (-) strand; PAM type: YTN; PAM sequence: CTA
caggtgcccaccaccacgcc

SEQ ID NO: 13522 - DNA, 20 bp, Artificial Sequence
  Description of Artificial Sequence: Synthetic oligonucleotide
  Target: ANGPTL4; (-) strand; PAM type: YTN; PAM sequence: CTG
ggactacaggtgcccaccac

SEQ ID NO: 13523 - DNA, 20 bp, Artificial Sequence
  Description of Artificial Sequence: Synthetic oligonucleotide
  Target: ANGPTL4; (-) strand; PAM type: YTN; PAM sequence: CTG
agtagctgggactacaggtg

SEQ ID NO: 13524 - DNA, 20 bp, Artificial Sequence
  Description of Artificial Sequence: Synthetic oligonucleotide
  Target: ANGPTL4; (-) strand; PAM type: YTN; PAM sequence: CTC
ctgagtagctgggactacag

SEQ ID NO: 13525 - DNA, 20 bp, Artificial Sequence
  Description of Artificial Sequence: Synthetic oligonucleotide
  Target: ANGPTL4; (-) strand; PAM type: YTN; PAM sequence: CTC
agcctcctgagtagctggga

SEQ ID NO: 13526 - DNA, 20 bp, Artificial Sequence
  Description of Artificial Sequence: Synthetic oligonucleotide
  Target: ANGPTL4; (-) strand; PAM type: YTN; PAM sequence: CTG
cctcagcctcctgagtagct

SEQ ID NO: 13527 - DNA, 20 bp, Artificial Sequence
  Description of Artificial Sequence: Synthetic oligonucleotide
  Target: ANGPTL4; (-) strand; PAM type: YTN; PAM sequence: CTC
ctgcctcagcctcctgagta

SEQ ID NO: 13528 - DNA, 20 bp, Artificial Sequence
  Description of Artificial Sequence: Synthetic oligonucleotide
  Target: ANGPTL4; (-) strand; PAM type: YTN; PAM sequence: TTC
tcctgcctcagcctcctgag

SEQ ID NO: 13529 - DNA, 20 bp, Artificial Sequence
  Description of Artificial Sequence: Synthetic oligonucleotide
  Target: ANGPTL4; (-) strand; PAM type: YTN; PAM sequence: TTC
ccgccattctcctgcctcag

SEQ ID NO: 13530 - DNA, 20 bp, Artificial Sequence
  Description of Artificial Sequence: Synthetic oligonucleotide
  Target: ANGPTL4; (-) strand; PAM type: YTN; PAM sequence: CTC
ccaggttcccgccattctcc

SEQ ID NO: 13531 - DNA, 20 bp, Artificial Sequence
  Description of Artificial Sequence: Synthetic oligonucleotide
  Target: ANGPTL4; (-) strand; PAM type: YTN; PAM sequence: CTC
cacctcccaggttcccgcca

SEQ ID NO: 13532 - DNA, 20 bp, Artificial Sequence
  Description of Artificial Sequence: Synthetic oligonucleotide
  Target: ANGPTL4; (-) strand; PAM type: YTN; PAM sequence: CTG
caagctccacctcccaggtt

SEQ ID NO: 13533 - DNA, 20 bp, Artificial Sequence
  Description of Artificial Sequence: Synthetic oligonucleotide
  Target: ANGPTL4; (-) strand; PAM type: YTN; PAM sequence: CTC
actgcaagctccacctccca

SEQ ID NO: 13534 - DNA, 20 bp, Artificial Sequence
  Description of Artificial Sequence: Synthetic oligonucleotide
  Target: ANGPTL4; (-) strand; PAM type: YTN; PAM sequence: CTC
ggctcactgcaagctccacc

SEQ ID NO: 13535 - DNA, 20 bp, Artificial Sequence
  Description of Artificial Sequence: Synthetic oligonucleotide
  Target: ANGPTL4; (-) strand; PAM type: YTN; PAM sequence: CTC
atctcggctcactgcaagct

SEQ ID NO: 13536 - DNA, 20 bp, Artificial Sequence
  Description of Artificial Sequence: Synthetic oligonucleotide
  Target: ANGPTL4; (-) strand; PAM type: YTN; PAM sequence: CTG
gagtgcagtggcctcatctc

SEQ ID NO: 13537 - DNA, 20 bp, Artificial Sequence
  Description of Artificial Sequence: Synthetic oligonucleotide
  Target: ANGPTL4; (-) strand; PAM type: YTN; PAM sequence: TTG
cccaggctggagtgcagtgg

SEQ ID NO: 13538 - DNA, 20 bp, Artificial Sequence
  Description of Artificial Sequence: Synthetic oligonucleotide
  Target: ANGPTL4; (-) strand; PAM type: YTN; PAM sequence: CTG
ttgcccaggctggagtgcag

SEQ ID NO: 13539 - DNA, 20 bp, Artificial Sequence
  Description of Artificial Sequence: Synthetic oligonucleotide
  Target: ANGPTL4; (-) strand; PAM type: YTN; PAM sequence: CTC
tgttgcccaggctggagtgc

SEQ ID NO: 13540 - DNA, 20 bp, Artificial Sequence
  Description of Artificial Sequence: Synthetic oligonucleotide
  Target: ANGPTL4; (-) strand; PAM type: YTN; PAM sequence: TTG
ctctgttgcccaggctggag

SEQ ID NO: 13541 - DNA, 20 bp, Artificial Sequence
  Description of Artificial Sequence: Synthetic oligonucleotide
  Target: ANGPTL4; (-) strand; PAM type: YTN; PAM sequence: CTT
gctctgttgcccaggctgga

SEQ ID NO: 13542 - DNA, 20 bp, Artificial Sequence
  Description of Artificial Sequence: Synthetic oligonucleotide
  Target: ANGPTL4; (-) strand; PAM type: YTN; PAM sequence: TTG
agacagagtcttgctctgtt

SEQ ID NO: 13543 - DNA, 20 bp, Artificial Sequence
  Description of Artificial Sequence: Synthetic oligonucleotide
  Target: ANGPTL4; (-) strand; PAM type: YTN; PAM sequence: TTT
gagacagagtcttgctctgt

SEQ ID NO: 13544 - DNA, 20 bp, Artificial Sequence
  Description of Artificial Sequence: Synthetic oligonucleotide
  Target: ANGPTL4; (-) strand; PAM type: YTN; PAM sequence: TTT
tgagacagagtcttgctctg

SEQ ID NO: 13545 - DNA, 20 bp, Artificial Sequence
  Description of Artificial Sequence: Synthetic oligonucleotide
  Target: ANGPTL4; (-) strand; PAM type: YTN; PAM sequence: TTT
ttgagacagagtcttgctct

SEQ ID NO: 13546 - DNA, 20 bp, Artificial Sequence
  Description of Artificial Sequence: Synthetic oligonucleotide
  Target: ANGPTL4; (-) strand; PAM type: YTN; PAM sequence: TTT
tttgagacagagtcttgctc

SEQ ID NO: 13547 - DNA, 20 bp, Artificial Sequence
  Description of Artificial Sequence: Synthetic oligonucleotide
  Target: ANGPTL4; (-) strand; PAM type: YTN; PAM sequence: TTT
ttttgagacagagtcttgct

SEQ ID NO: 13548 - DNA, 20 bp, Artificial Sequence
  Description of Artificial Sequence: Synthetic oligonucleotide
  Target: ANGPTL4; (-) strand; PAM type: YTN; PAM sequence: TTT
tttttgagacagagtcttgc

SEQ ID NO: 13549 - DNA, 20 bp, Artificial Sequence
  Description of Artificial Sequence: Synthetic oligonucleotide
  Target: ANGPTL4; (-) strand; PAM type: YTN; PAM sequence: TTT
ttttttgagacagagtcttg

SEQ ID NO: 13550 - DNA, 20 bp, Artificial Sequence
  Description of Artificial Sequence: Synthetic oligonucleotide
  Target: ANGPTL4; (-) strand; PAM type: YTN; PAM sequence: TTT
tttttttgagacagagtctt

SEQ ID NO: 13551 - DNA, 20 bp, Artificial Sequence
  Description of Artificial Sequence: Synthetic oligonucleotide
  Target: ANGPTL4; (-) strand; PAM type: YTN; PAM sequence: TTT
ttttttttgagacagagtct

SEQ ID NO: 13552 - DNA, 20 bp, Artificial Sequence
  Description of Artificial Sequence: Synthetic oligonucleotide
  Target: ANGPTL4; (-) strand; PAM type: YTN; PAM sequence: TTT
tttttttttgagacagagtc

SEQ ID NO: 13553 - DNA, 20 bp, Artificial Sequence
  Description of Artificial Sequence: Synthetic oligonucleotide
  Target: ANGPTL4; (-) strand; PAM type: YTN; PAM sequence: TTT
ttttttttttgagacagagt

SEQ ID NO: 13554 - DNA, 20 bp, Artificial Sequence
  Description of Artificial Sequence: Synthetic oligonucleotide
  Target: ANGPTL4; (-) strand; PAM type: YTN; PAM sequence: TTT
tttttttttttgagacagag

SEQ ID NO: 13555 - DNA, 20 bp, Artificial Sequence
  Description of Artificial Sequence: Synthetic oligonucleotide
  Target: ANGPTL4; (-) strand; PAM type: YTN; PAM sequence: TTT
ttttttttttttgagacaga

SEQ ID NO: 13556 - DNA, 20 bp, Artificial Sequence
  Description of Artificial Sequence: Synthetic oligonucleotide
  Target: ANGPTL4; (-) strand; PAM type: YTN; PAM sequence: TTT
tttttttttttttgagacag

SEQ ID NO: 13557 - DNA, 20 bp, Artificial Sequence
  Description of Artificial Sequence: Synthetic oligonucleotide
  Target: ANGPTL4; (-) strand; PAM type: YTN; PAM sequence: TTT
ttttttttttttttgagaca

SEQ ID NO: 13558 - DNA, 20 bp, Artificial Sequence
  Description of Artificial Sequence: Synthetic oligonucleotide
  Target: ANGPTL4; (-) strand; PAM type: YTN; PAM sequence: TTT
tttttttttttttttgagac

SEQ ID NO: 13559 - DNA, 20 bp, Artificial Sequence
  Description of Artificial Sequence: Synthetic oligonucleotide
  Target: ANGPTL4; (-) strand; PAM type: YTN; PAM sequence: TTT
ttttttttttttttttgaga

SEQ ID NO: 13560 - DNA, 20 bp, Artificial Sequence
  Description of Artificial Sequence: Synthetic oligonucleotide
  Target: ANGPTL4; (-) strand; PAM type: YTN; PAM sequence: TTT
tttttttttttttttttgag

SEQ ID NO: 13561 - DNA, 20 bp, Artificial Sequence
  Description of Artificial Sequence: Synthetic oligonucleotide
  Target: ANGPTL4; (-) strand; PAM type: YTN; PAM sequence: CTT
ttttttttttttttttttga

SEQ ID NO: 13562 - DNA, 20 bp, Artificial Sequence
  Description of Artificial Sequence: Synthetic oligonucleotide
  Target: ANGPTL4; (-) strand; PAM type: YTN; PAM sequence: CTA
gccttttttttttttttttt

SEQ ID NO: 13563 - DNA, 20 bp, Artificial Sequence
  Description of Artificial Sequence: Synthetic oligonucleotide
  Target: ANGPTL4; (-) strand; PAM type: YTN; PAM sequence: CTG
gcctagcctttttttttttt

SEQ ID NO: 13564 - DNA, 20 bp, Artificial Sequence
  Description of Artificial Sequence: Synthetic oligonucleotide
  Target: ANGPTL4; (-) strand; PAM type: YTN; PAM sequence: CTG
tgcctggcctagcctttttt

SEQ ID NO: 13565 - DNA, 20 bp, Artificial Sequence
  Description of Artificial Sequence: Synthetic oligonucleotide
  Target: ANGPTL4; (-) strand; PAM type: YTN; PAM sequence: TTA
caggtgtgagccactgtgcc

SEQ ID NO: 13566 - DNA, 20 bp, Artificial Sequence
  Description of Artificial Sequence: Synthetic oligonucleotide
  Target: ANGPTL4; (-) strand; PAM type: YTN; PAM sequence: CTG
ggattacaggtgtgagccac

SEQ ID NO: 13567 - DNA, 20 bp, Artificial Sequence
  Description of Artificial Sequence: Synthetic oligonucleotide
  Target: ANGPTL4; (-) strand; PAM type: YTN; PAM sequence: CTC
ccaacgtgctgggattacag

SEQ ID NO: 13568 - DNA, 20 bp, Artificial Sequence
  Description of Artificial Sequence: Synthetic oligonucleotide
  Target: ANGPTL4; (-) strand; PAM type: YTN; PAM sequence: CTC
ggcctcccaacgtgctggga

SEQ ID NO: 13569 - DNA, 20 bp, Artificial Sequence
  Description of Artificial Sequence: Synthetic oligonucleotide
  Target: ANGPTL4; (-) strand; PAM type: YTN; PAM sequence: CTG
tctcggcctcccaacgtgct

SEQ ID NO: 13570 - DNA, 20 bp, Artificial Sequence
  Description of Artificial Sequence: Synthetic oligonucleotide
  Target: ANGPTL4; (-) strand; PAM type: YTN; PAM sequence: CTC
aggtgatccacctgtctcgg

SEQ ID NO: 13571 - DNA, 20 bp, Artificial Sequence
  Description of Artificial Sequence: Synthetic oligonucleotide
  Target: ANGPTL4; (-) strand; PAM type: YTN; PAM sequence: CTG
acctcaggtgatccacctgt

SEQ ID NO: 13572 - DNA, 20 bp, Artificial Sequence
  Description of Artificial Sequence: Synthetic oligonucleotide
  Target: ANGPTL4; (-) strand; PAM type: YTN; PAM sequence: TTC
ctgacctcaggtgatccacc

SEQ ID NO: 13573 - DNA, 20 bp, Artificial Sequence
  Description of Artificial Sequence: Synthetic oligonucleotide
  Target: ANGPTL4; (-) strand; PAM type: YTN; PAM sequence: CTC
aaattcctgacctcaggtga

SEQ ID NO: 13574 - DNA, 20 bp, Artificial Sequence
  Description of Artificial Sequence: Synthetic oligonucleotide
  Target: ANGPTL4; (-) strand; PAM type: YTN; PAM sequence: CTG
gtctcaaattcctgacctca

SEQ ID NO: 13575 - DNA, 20 bp, Artificial Sequence
  Description of Artificial Sequence: Synthetic oligonucleotide
  Target: ANGPTL4; (-) strand; PAM type: YTN; PAM sequence: CTG
ctggtctcaaattcctgacc

SEQ ID NO: 13576 - DNA, 20 bp, Artificial Sequence
  Description of Artificial Sequence: Synthetic oligonucleotide
  Target: ANGPTL4; (-) strand; PAM type: YTN; PAM sequence: CTC
tgctggtctcaaattcctga

SEQ ID NO: 13577 - DNA, 20 bp, Artificial Sequence
  Description of Artificial Sequence: Synthetic oligonucleotide
  Target: ANGPTL4; (-) strand; PAM type: YTN; PAM sequence: TTG
gctctgctggtctcaaattc

SEQ ID NO: 13578 - DNA, 20 bp, Artificial Sequence
  Description of Artificial Sequence: Synthetic oligonucleotide
  Target: ANGPTL4; (-) strand; PAM type: YTN; PAM sequence: CTA
tgttggctctgctggtctca

SEQ ID NO: 13579 - DNA, 20 bp, Artificial Sequence
  Description of Artificial Sequence: Synthetic oligonucleotide
  Target: ANGPTL4; (-) strand; PAM type: YTN; PAM sequence: TTC
actatgttggctctgctggt

SEQ ID NO: 13580 - DNA, 20 bp, Artificial Sequence
  Description of Artificial Sequence: Synthetic oligonucleotide
  Target: ANGPTL4; (-) strand; PAM type: YTN; PAM sequence: TTT
cactatgttggctctgctgg

SEQ ID NO: 13581 - DNA, 20 bp, Artificial Sequence
  Description of Artificial Sequence: Synthetic oligonucleotide
  Target: ANGPTL4; (-) strand; PAM type: YTN; PAM sequence: TTA
gtgcaaacggggtttcacta

SEQ ID NO: 13582 - DNA, 20 bp, Artificial Sequence
  Description of Artificial Sequence: Synthetic oligonucleotide
  Target: ANGPTL4; (-) strand; PAM type: YTN; PAM sequence: TTT
agtgcaaacggggtttcact

SEQ ID NO: 13583 - DNA, 20 bp, Artificial Sequence
  Description of Artificial Sequence: Synthetic oligonucleotide
  Target: ANGPTL4; (-) strand; PAM type: YTN; PAM sequence: TTT
tagtgcaaacggggtttcac

SEQ ID NO: 13584 - DNA, 20 bp, Artificial Sequence
  Description of Artificial Sequence: Synthetic oligonucleotide
  Target: ANGPTL4; (-) strand; PAM type: YTN; PAM sequence: TTT
ttagtgcaaacggggtttca

SEQ ID NO: 13585 - DNA, 20 bp, Artificial Sequence
  Description of Artificial Sequence: Synthetic oligonucleotide
  Target: ANGPTL4; (-) strand; PAM type: YTN; PAM sequence: TTG
tatttttagtgcaaacgggg

SEQ ID NO: 13586 - DNA, 20 bp, Artificial Sequence
  Description of Artificial Sequence: Synthetic oligonucleotide
  Target: ANGPTL4; (-) strand; PAM type: YTN; PAM sequence: TTT
gtatttttagtgcaaacggg

SEQ ID NO: 13587 - DNA, 20 bp, Artificial Sequence
  Description of Artificial Sequence: Synthetic oligonucleotide
  Target: ANGPTL4; (-) strand; PAM type: YTN; PAM sequence: TTT
tgtatttttagtgcaaacgg

SEQ ID NO: 13588 - DNA, 20 bp, Artificial Sequence
  Description of Artificial Sequence: Synthetic oligonucleotide
  Target: ANGPTL4; (-) strand; PAM type: YTN; PAM sequence: TTT
ttgtatttttagtgcaaacg

SEQ ID NO: 13589 - DNA, 20 bp, Artificial Sequence
  Description of Artificial Sequence: Synthetic oligonucleotide
  Target: ANGPTL4; (-) strand; PAM type: YTN; PAM sequence: TTT
tttgtatttttagtgcaaac

SEQ ID NO: 13590 - DNA, 20 bp, Artificial Sequence
  Description of Artificial Sequence: Synthetic oligonucleotide
  Target: ANGPTL4; (-) strand; PAM type: YTN; PAM sequence: CTA
attttttgtatttttagtgc

SEQ ID NO: 13591 - DNA, 20 bp, Artificial Sequence
  Description of Artificial Sequence: Synthetic oligonucleotide
  Target: ANGPTL4; (-) strand; PAM type: YTN; PAM sequence: CTG
actaattttttgtattttta

SEQ ID NO: 13592 - DNA, 20 bp, Artificial Sequence
  Description of Artificial Sequence: Synthetic oligonucleotide
  Target: ANGPTL4; (-) strand; PAM type: YTN; PAM sequence: TTA
caggtgtgcaccaccacacc

SEQ ID NO: 13593 - DNA, 20 bp, Artificial Sequence
  Description of Artificial Sequence: Synthetic oligonucleotide
  Target: ANGPTL4; (-) strand; PAM type: YTN; PAM sequence: CTC
ccgagtagcggggattacag

SEQ ID NO: 13594 - DNA, 20 bp, Artificial Sequence
  Description of Artificial Sequence: Synthetic oligonucleotide
  Target: ANGPTL4; (-) strand; PAM type: YTN; PAM sequence: CTC
agcctcccgagtagcgggga

SEQ ID NO: 13595 - DNA, 20 bp, Artificial Sequence
  Description of Artificial Sequence: Synthetic oligonucleotide
  Target: ANGPTL4; (-) strand; PAM type: YTN; PAM sequence: CTC
cagcctcagcctcccgagta

SEQ ID NO: 13596 - DNA, 20 bp, Artificial Sequence
  Description of Artificial Sequence: Synthetic oligonucleotide
  Target: ANGPTL4; (-) strand; PAM type: YTN; PAM sequence: TTC
tccagcctcagcctcccgag

SEQ ID NO: 13597 - DNA, 20 bp, Artificial Sequence
  Description of Artificial Sequence: Synthetic oligonucleotide
  Target: ANGPTL4; (-) strand; PAM type: YTN; PAM sequence: TTC
aagcgattctccagcctcag

SEQ ID NO: 13598 - DNA, 20 bp, Artificial Sequence
  Description of Artificial Sequence: Synthetic oligonucleotide
  Target: ANGPTL4; (-) strand; PAM type: YTN; PAM sequence: CTC
ccaggttcaagcgattctcc

SEQ ID NO: 13599 - DNA, 20 bp, Artificial Sequence
  Description of Artificial Sequence: Synthetic oligonucleotide
  Target: ANGPTL4; (-) strand; PAM type: YTN; PAM sequence: CTG
cctcccaggttcaagcgatt

SEQ ID NO: 13600 - DNA, 20 bp, Artificial Sequence
  Description of Artificial Sequence: Synthetic oligonucleotide
  Target: ANGPTL4; (-) strand; PAM type: YTN; PAM sequence: CTC
tgcctcccaggttcaagcga

SEQ ID NO: 13601 - DNA, 20 bp, Artificial Sequence
  Description of Artificial Sequence: Synthetic oligonucleotide
  Target: ANGPTL4; (-) strand; PAM type: YTN; PAM sequence: CTG
caacctctgcctcccaggtt

SEQ ID NO: 13602 - DNA, 20 bp, Artificial Sequence
  Description of Artificial Sequence: Synthetic oligonucleotide
  Target: ANGPTL4; (-) strand; PAM type: YTN; PAM sequence: CTC
actgcaacctctgcctccca

SEQ ID NO: 13603 - DNA, 20 bp, Artificial Sequence
  Description of Artificial Sequence: Synthetic oligonucleotide
  Target: ANGPTL4; (-) strand; PAM type: YTN; PAM sequence: CTC
cgctcactgcaacctctgcc

SEQ ID NO: 13604 - DNA, 20 bp, Artificial Sequence
  Description of Artificial Sequence: Synthetic oligonucleotide
  Target: ANGPTL4; (-) strand; PAM type: YTN; PAM sequence: CTG
gagtgcaacggcgcaatctc

SEQ ID NO: 13605 - DNA, 20 bp, Artificial Sequence
  Description of Artificial Sequence: Synthetic oligonucleotide
  Target: ANGPTL4; (-) strand; PAM type: YTN; PAM sequence: TTG
tcgcccaggctggagtgcaa

SEQ ID NO: 13606 - DNA, 20 bp, Artificial Sequence
  Description of Artificial Sequence: Synthetic oligonucleotide
  Target: ANGPTL4; (-) strand; PAM type: YTN; PAM sequence: CTT
gtcgcccaggctggagtgca

SEQ ID NO: 13607 - DNA, 20 bp, Artificial Sequence
  Description of Artificial Sequence: Synthetic oligonucleotide
  Target: ANGPTL4; (-) strand; PAM type: YTN; PAM sequence: CTC
ttgtcgcccaggctggagtg

SEQ ID NO: 13608 - DNA, 20 bp, Artificial Sequence
  Description of Artificial Sequence: Synthetic oligonucleotide
  Target: ANGPTL4; (-) strand; PAM type: YTN; PAM sequence: TTC
cctcttgtcgcccaggctgg

SEQ ID NO: 13609 - DNA, 20 bp, Artificial Sequence
  Description of Artificial Sequence: Synthetic oligonucleotide
  Target: ANGPTL4; (-) strand; PAM type: YTN; PAM sequence: TTT
ccctcttgtcgcccaggctg

SEQ ID NO: 13610 - DNA, 20 bp, Artificial Sequence
  Description of Artificial Sequence: Synthetic oligonucleotide
  Target: ANGPTL4; (-) strand; PAM type: YTN; PAM sequence: TTG
agatggagtttccctcttgt

SEQ ID NO: 13611 - DNA, 20 bp, Artificial Sequence
  Description of Artificial Sequence: Synthetic oligonucleotide
  Target: ANGPTL4; (-) strand; PAM type: YTN; PAM sequence: TTT
gagatggagtttccctcttg

SEQ ID NO: 13612 - DNA, 20 bp, Artificial Sequence
  Description of Artificial Sequence: Synthetic oligonucleotide
  Target: ANGPTL4; (-) strand; PAM type: YTN; PAM sequence: TTT
tgagatggagtttccctctt

SEQ ID NO: 13613 - DNA, 20 bp, Artificial Sequence
  Description of Artificial Sequence: Synthetic oligonucleotide
  Target: ANGPTL4; (-) strand; PAM type: YTN; PAM sequence: TTT
ttgagatggagtttccctct

SEQ ID NO: 13614 - DNA, 20 bp, Artificial Sequence
  Description of Artificial Sequence: Synthetic oligonucleotide
  Target: ANGPTL4; (-) strand; PAM type: YTN; PAM sequence: TTT
tttgagatggagtttccctc

SEQ ID NO: 13615 - DNA, 20 bp, Artificial Sequence
  Description of Artificial Sequence: Synthetic oligonucleotide
  Target: ANGPTL4; (-) strand; PAM type: YTN; PAM sequence: TTT
ttttgagatggagtttccct

SEQ ID NO: 13616 - DNA, 20 bp, Artificial Sequence
  Description of Artificial Sequence: Synthetic oligonucleotide
  Target: ANGPTL4; (-) strand; PAM type: YTN; PAM sequence: TTA
tttttttgagatggagtttc

SEQ ID NO: 13617 - DNA, 20 bp, Artificial Sequence
  Description of Artificial Sequence: Synthetic oligonucleotide
  Target: ANGPTL4; (-) strand; PAM type: YTN; PAM sequence: TTT
atttttttgagatggagttt

SEQ ID NO: 13618 - DNA, 20 bp, Artificial Sequence
  Description of Artificial Sequence: Synthetic oligonucleotide
  Target: ANGPTL4; (-) strand; PAM type: YTN; PAM sequence: TTA
tttatttttttgagatggag

SEQ ID NO: 13619 - DNA, 20 bp, Artificial Sequence
  Description of Artificial Sequence: Synthetic oligonucleotide
  Target: ANGPTL4; (-) strand; PAM type: YTN; PAM sequence: TTT
atttatttttttgagatgga

SEQ ID NO: 13620 - DNA, 20 bp, Artificial Sequence
  Description of Artificial Sequence: Synthetic oligonucleotide
  Target: ANGPTL4; (-) strand; PAM type: YTN; PAM sequence: TTA
tttatttatttttttgagat

SEQ ID NO: 13621 - DNA, 20 bp, Artificial Sequence
  Description of Artificial Sequence: Synthetic oligonucleotide
  Target: ANGPTL4; (-) strand; PAM type: YTN; PAM sequence: TTT
atttatttatttttttgaga

SEQ ID NO: 13622 - DNA, 20 bp, Artificial Sequence
  Description of Artificial Sequence: Synthetic oligonucleotide
  Target: ANGPTL4; (-) strand; PAM type: YTN; PAM sequence: TTT
tatttatttatttttttgag

SEQ ID NO: 13623 - DNA, 20 bp, Artificial Sequence
  Description of Artificial Sequence: Synthetic oligonucleotide
  Target: ANGPTL4; (-) strand; PAM type: YTN; PAM sequence: TTA
ttttatttatttattttttt

SEQ ID NO: 13624 - DNA, 20 bp, Artificial Sequence
  Description of Artificial Sequence: Synthetic oligonucleotide
  Target: ANGPTL4; (-) strand; PAM type: YTN; PAM sequence: TTT
attttatttatttatttttt

SEQ ID NO: 13625 - DNA, 20 bp, Artificial Sequence
  Description of Artificial Sequence: Synthetic oligonucleotide
  Target: ANGPTL4; (-) strand; PAM type: YTN; PAM sequence: TTT
tattttatttatttattttt

SEQ ID NO: 13626 - DNA, 20 bp, Artificial Sequence
  Description of Artificial Sequence: Synthetic oligonucleotide
  Target: ANGPTL4; (-) strand; PAM type: YTN; PAM sequence: TTT
ttattttatttatttatttt

SEQ ID NO: 13627 - DNA, 20 bp, Artificial Sequence
  Description of Artificial Sequence: Synthetic oligonucleotide
  Target: ANGPTL4; (-) strand; PAM type: YTN; PAM sequence: TTT
tttattttatttatttattt

SEQ ID NO: 13628 - DNA, 20 bp, Artificial Sequence
  Description of Artificial Sequence: Synthetic oligonucleotide
  Target: ANGPTL4; (-) strand; PAM type: YTN; PAM sequence: CTA
ttttttattttatttattta

SEQ ID NO: 13629 - DNA, 20 bp, Artificial Sequence
  Description of Artificial Sequence: Synthetic oligonucleotide
  Target: ANGPTL4; (-) strand; PAM type: YTN; PAM sequence: TTA
caggcatgagccaccgcgcc

SEQ ID NO: 13630 - DNA, 20 bp, Artificial Sequence
  Description of Artificial Sequence: Synthetic oligonucleotide
  Target: ANGPTL4; (-) strand; PAM type: YTN; PAM sequence: CTG
ggattacaggcatgagccac

SEQ ID NO: 13631 - DNA, 20 bp, Artificial Sequence
  Description of Artificial Sequence: Synthetic oligonucleotide
  Target: ANGPTL4; (-) strand; PAM type: YTN; PAM sequence: CTC
ccaaagtgctgggattacag

SEQ ID NO: 13632 - DNA, 20 bp, Artificial Sequence
  Description of Artificial Sequence: Synthetic oligonucleotide
  Target: ANGPTL4; (-) strand; PAM type: YTN; PAM sequence: TTC
ggcctcccaaagtgctggga

SEQ ID NO: 13633 - DNA, 20 bp, Artificial Sequence
  Description of Artificial Sequence: Synthetic oligonucleotide
  Target: ANGPTL4; (-) strand; PAM type: YTN; PAM sequence: CTT
cggcctcccaaagtgctggg

SEQ ID NO: 13634 - DNA, 20 bp, Artificial Sequence
  Description of Artificial Sequence: Synthetic oligonucleotide
  Target: ANGPTL4; (-) strand; PAM type: YTN; PAM sequence: CTC
gtgatccgcccgcttcggcc

SEQ ID NO: 13635 - DNA, 20 bp, Artificial Sequence
  Description of Artificial Sequence: Synthetic oligonucleotide
  Target: ANGPTL4; (-) strand; PAM type: YTN; PAM sequence: CTG
acctcgtgatccgcccgctt

SEQ ID NO: 13636 - DNA, 20 bp, Artificial Sequence
  Description of Artificial Sequence: Synthetic oligonucleotide
  Target: ANGPTL4; (-) strand; PAM type: YTN; PAM sequence: CTC
ctgacctcgtgatccgcccg

SEQ ID NO: 13637 - DNA, 20 bp, Artificial Sequence
  Description of Artificial Sequence: Synthetic oligonucleotide
  Target: ANGPTL4; (-) strand; PAM type: YTN; PAM sequence: CTC
gatctcctgacctcgtgatc

SEQ ID NO: 13638 - DNA, 20 bp, Artificial Sequence
  Description of Artificial Sequence: Synthetic oligonucleotide
  Target: ANGPTL4; (-) strand; PAM type: YTN; PAM sequence: TTA
gccaggatggtctcgatctc

SEQ ID NO: 13639 - DNA, 20 bp, Artificial Sequence
  Description of Artificial Sequence: Synthetic oligonucleotide
  Target: ANGPTL4; (-) strand; PAM type: YTN; PAM sequence: TTC
accatgttagccaggatggt

SEQ ID NO: 13640 - DNA, 20 bp, Artificial Sequence
  Description of Artificial Sequence: Synthetic oligonucleotide
  Target: ANGPTL4; (-) strand; PAM type: YTN; PAM sequence: TTT
caccatgttagccaggatgg

SEQ ID NO: 13641 - DNA, 20 bp, Artificial Sequence
  Description of Artificial Sequence: Synthetic oligonucleotide
  Target: ANGPTL4; (-) strand; PAM type: YTN; PAM sequence: TTA
atagagacagggtttcacca

SEQ ID NO: 13642 - DNA, 20 bp, Artificial Sequence
  Description of Artificial Sequence: Synthetic oligonucleotide
  Target: ANGPTL4; (-) strand; PAM type: YTN; PAM sequence: TTT
aatagagacagggtttcacc

SEQ ID NO: 13643 - DNA, 20 bp, Artificial Sequence
  Description of Artificial Sequence: Synthetic oligonucleotide
  Target: ANGPTL4; (-) strand; PAM type: YTN; PAM sequence: TTT
taatagagacagggtttcac

SEQ ID NO: 13644 - DNA, 20 bp, Artificial Sequence
  Description of Artificial Sequence: Synthetic oligonucleotide
  Target: ANGPTL4; (-) strand; PAM type: YTN; PAM sequence: TTT
ttaatagagacagggtttca

SEQ ID NO: 13645 - DNA, 20 bp, Artificial Sequence
  Description of Artificial Sequence: Synthetic oligonucleotide
  Target: ANGPTL4; (-) strand; PAM type: YTN; PAM sequence: TTG
tatttttaatagagacaggg

SEQ ID NO: 13646 - DNA, 20 bp, Artificial Sequence
  Description of Artificial Sequence: Synthetic oligonucleotide
  Target: ANGPTL4; (-) strand; PAM type: YTN; PAM sequence: TTT
gtatttttaatagagacagg

SEQ ID NO: 13647 - DNA, 20 bp, Artificial Sequence
  Description of Artificial Sequence: Synthetic oligonucleotide
  Target: ANGPTL4; (-) strand; PAM type: YTN; PAM sequence: TTT
tgtatttttaatagagacag

SEQ ID NO: 13648 - DNA, 20 bp, Artificial Sequence
  Description of Artificial Sequence: Synthetic oligonucleotide
  Target: ANGPTL4; (-) strand; PAM type: YTN; PAM sequence: TTT
ttgtatttttaatagagaca

SEQ ID NO: 13649 - DNA, 20 bp, Artificial Sequence
  Description of Artificial Sequence: Synthetic oligonucleotide
  Target: ANGPTL4; (-) strand; PAM type: YTN; PAM sequence: TTT
tttgtatttttaatagagac

SEQ ID NO: 13650 - DNA, 20 bp, Artificial Sequence
  Description of Artificial Sequence: Synthetic oligonucleotide
  Target: ANGPTL4; (-) strand; PAM type: YTN; PAM sequence: CTA
attttttgtatttttaatag

SEQ ID NO: 13651 - DNA, 20 bp, Artificial Sequence
  Description of Artificial Sequence: Synthetic oligonucleotide
  Target: ANGPTL4; (-) strand; PAM type: YTN; PAM sequence: CTG
ccaccatgcccagctaattt

SEQ ID NO: 13652 - DNA, 20 bp, Artificial Sequence
  Description of Artificial Sequence: Synthetic oligonucleotide
  Target: ANGPTL4; (-) strand; PAM type: YTN; PAM sequence: CTA
caggcacctgccaccatgcc

SEQ ID NO: 13653 - DNA, 20 bp, Artificial Sequence
  Description of Artificial Sequence: Synthetic oligonucleotide
  Target: ANGPTL4; (-) strand; PAM type: YTN; PAM sequence: CTG
ggactacaggcacctgccac

SEQ ID NO: 13654 - DNA, 20 bp, Artificial Sequence
  Description of Artificial Sequence: Synthetic oligonucleotide
  Target: ANGPTL4; (-) strand; PAM type: YTN; PAM sequence: CTC
ccgagtagctgggactacag

SEQ ID NO: 13655 - DNA, 20 bp, Artificial Sequence
  Description of Artificial Sequence: Synthetic oligonucleotide
  Target: ANGPTL4; (-) strand; PAM type: YTN; PAM sequence: CTC
agcctcccgagtagctggga

SEQ ID NO: 13656 - DNA, 20 bp, Artificial Sequence
  Description of Artificial Sequence: Synthetic oligonucleotide
  Target: ANGPTL4; (-) strand; PAM type: YTN; PAM sequence: CTG
cctcagcctcccgagtagct

SEQ ID NO: 13657 - DNA, 20 bp, Artificial Sequence
  Description of Artificial Sequence: Synthetic oligonucleotide
  Target: ANGPTL4; (-) strand; PAM type: YTN; PAM sequence: CTC
ctgcctcagcctcccgagta

SEQ ID NO: 13658 - DNA, 20 bp, Artificial Sequence
  Description of Artificial Sequence: Synthetic oligonucleotide
  Target: ANGPTL4; (-) strand; PAM type: YTN; PAM sequence: TTC
tcctgcctcagcctcccgag

SEQ ID NO: 13659 - DNA, 20 bp, Artificial Sequence
  Description of Artificial Sequence: Synthetic oligonucleotide
  Target: ANGPTL4; (-) strand; PAM type: YTN; PAM sequence: TTA
gtgccattctcctgcctcag

SEQ ID NO: 13660 - DNA, 20 bp, Artificial Sequence
  Description of Artificial Sequence: Synthetic oligonucleotide
  Target: ANGPTL4; (-) strand; PAM type: YTN; PAM sequence: CTC
ccgggttagtgccattctcc

SEQ ID NO: 13661 - DNA, 20 bp, Artificial Sequence
  Description of Artificial Sequence: Synthetic oligonucleotide
  Target: ANGPTL4; (-) strand; PAM type: YTN; PAM sequence: CTC
cacctcccgggttagtgcca

SEQ ID NO: 13662 - DNA, 20 bp, Artificial Sequence
  Description of Artificial Sequence: Synthetic oligonucleotide
  Target: ANGPTL4; (-) strand; PAM type: YTN; PAM sequence: CTG
caagctccacctcccgggtt

SEQ ID NO: 13663 - DNA, 20 bp, Artificial Sequence
  Description of Artificial Sequence: Synthetic oligonucleotide
  Target: ANGPTL4; (-) strand; PAM type: YTN; PAM sequence: CTC
actgcaagctccacctcccg

SEQ ID NO: 13664 - DNA, 20 bp, Artificial Sequence
  Description of Artificial Sequence: Synthetic oligonucleotide
  Target: ANGPTL4; (-) strand; PAM type: YTN; PAM sequence: CTC
ggctcactgcaagctccacc

SEQ ID NO: 13665 - DNA, 20 bp, Artificial Sequence
  Description of Artificial Sequence: Synthetic oligonucleotide
  Target: ANGPTL4; (-) strand; PAM type: YTN; PAM sequence: CTG
gagtgcagtggcgcaatctc

SEQ ID NO: 13666 - DNA, 20 bp, Artificial Sequence
  Description of Artificial Sequence: Synthetic oligonucleotide
  Target: ANGPTL4; (-) strand; PAM type: YTN; PAM sequence: CTG
tcgcccacgctggagtgcag

SEQ ID NO: 13667 - DNA, 20 bp, Artificial Sequence
  Description of Artificial Sequence: Synthetic oligonucleotide
  Target: ANGPTL4; (-) strand; PAM type: YTN; PAM sequence: CTC
tgtcgcccacgctggagtgc

SEQ ID NO: 13668 - DNA, 20 bp, Artificial Sequence
  Description of Artificial Sequence: Synthetic oligonucleotide
  Target: ANGPTL4; (-) strand; PAM type: YTN; PAM sequence: CTC
gctctgtcgcccacgctgga

SEQ ID NO: 13669 - DNA, 20 bp, Artificial Sequence
  Description of Artificial Sequence: Synthetic oligonucleotide
  Target: ANGPTL4; (-) strand; PAM type: YTN; PAM sequence: TTG
agaaggagtctcgctctgtc

SEQ ID NO: 13670 - DNA, 20 bp, Artificial Sequence
  Description of Artificial Sequence: Synthetic oligonucleotide
  Target: ANGPTL4; (-) strand; PAM type: YTN; PAM sequence: TTT
gagaaggagtctcgctctgt

SEQ ID NO: 13671 - DNA, 20 bp, Artificial Sequence
  Description of Artificial Sequence: Synthetic oligonucleotide
  Target: ANGPTL4; (-) strand; PAM type: YTN; PAM sequence: TTT
tgagaaggagtctcgctctg

SEQ ID NO: 13672 - DNA, 20 bp, Artificial Sequence
  Description of Artificial Sequence: Synthetic oligonucleotide
  Target: ANGPTL4; (-) strand; PAM type: YTN; PAM sequence: TTT
ttgagaaggagtctcgctct

SEQ ID NO: 13673 - DNA, 20 bp, Artificial Sequence
  Description of Artificial Sequence: Synthetic oligonucleotide
  Target: ANGPTL4; (-) strand; PAM type: YTN; PAM sequence: TTT
tttgagaaggagtctcgctc

SEQ ID NO: 13674 - DNA, 20 bp, Artificial Sequence
  Description of Artificial Sequence: Synthetic oligonucleotide
  Target: ANGPTL4; (-) strand; PAM type: YTN; PAM sequence: TTA
ttttttgagaaggagtctcg

SEQ ID NO: 13675 - DNA, 20 bp, Artificial Sequence
  Description of Artificial Sequence: Synthetic oligonucleotide
  Target: ANGPTL4; (-) strand; PAM type: YTN; PAM sequence: TTT
attttttgagaaggagtctc

SEQ ID NO: 13676 - DNA, 20 bp, Artificial Sequence
  Description of Artificial Sequence: Synthetic oligonucleotide
  Target: ANGPTL4; (-) strand; PAM type: YTN; PAM sequence: TTA
tttattttttgagaaggagt

SEQ ID NO: 13677 - DNA, 20 bp, Artificial Sequence
  Description of Artificial Sequence: Synthetic oligonucleotide
  Target: ANGPTL4; (-) strand; PAM type: YTN; PAM sequence: TTT
atttattttttgagaaggag

SEQ ID NO: 13678 - DNA, 20 bp, Artificial Sequence
  Description of Artificial Sequence: Synthetic oligonucleotide
  Target: ANGPTL4; (-) strand; PAM type: YTN; PAM sequence: TTA
tttatttattttttgagaag

SEQ ID NO: 13679 - DNA, 20 bp, Artificial Sequence
  Description of Artificial Sequence: Synthetic oligonucleotide
  Target: ANGPTL4; (-) strand; PAM type: YTN; PAM sequence: TTT
atttatttattttttgagaa

SEQ ID NO: 13680 - DNA, 20 bp, Artificial Sequence
  Description of Artificial Sequence: Synthetic oligonucleotide
  Target: ANGPTL4; (-) strand; PAM type: YTN; PAM sequence: TTA
tttatttatttattttttga

SEQ ID NO: 13681 - DNA, 20 bp, Artificial Sequence
  Description of Artificial Sequence: Synthetic oligonucleotide
  Target: ANGPTL4; (-) strand; PAM type: YTN; PAM sequence: TTT
atttatttatttattttttg

SEQ ID NO: 13682 - DNA, 20 bp, Artificial Sequence
  Description of Artificial Sequence: Synthetic oligonucleotide
  Target: ANGPTL4; (-) strand; PAM type: YTN; PAM sequence: TTA
tttatttatttatttatttt

SEQ ID NO: 13683 - DNA, 20 bp, Artificial Sequence
  Description of Artificial Sequence: Synthetic oligonucleotide
  Target: ANGPTL4; (-) strand; PAM type: YTN; PAM sequence: TTT
atttatttatttatttattt

SEQ ID NO: 13684 - DNA, 20 bp, Artificial Sequence
  Description of Artificial Sequence: Synthetic oligonucleotide
  Target: ANGPTL4; (-) strand; PAM type: YTN; PAM sequence: TTA
tttatttatttatttattta

SEQ ID NO: 13685 - DNA, 20 bp, Artificial Sequence
  Description of Artificial Sequence: Synthetic oligonucleotide
  Target: ANGPTL4; (-) strand; PAM type: YTN; PAM sequence: TTT
atttatttatttatttattt

SEQ ID NO: 13686 - DNA, 20 bp, Artificial Sequence
  Description of Artificial Sequence: Synthetic oligonucleotide
  Target: ANGPTL4; (-) strand; PAM type: YTN; PAM sequence: TTA
tttatttatttatttattta

SEQ ID NO: 13687 - DNA, 20 bp, Artificial Sequence
  Description of Artificial Sequence: Synthetic oligonucleotide
  Target: ANGPTL4; (-) strand; PAM type: YTN; PAM sequence: TTT
atttatttatttatttattt

SEQ ID NO: 13688 - DNA, 20 bp, Artificial Sequence
  Description of Artificial Sequence: Synthetic oligonucleotide
  Target: ANGPTL4; (-) strand; PAM type: YTN; PAM sequence: TTA
tttatttatttatttattta

SEQ ID NO: 13689 - DNA, 20 bp, Artificial Sequence
  Description of Artificial Sequence: Synthetic oligonucleotide
  Target: ANGPTL4; (-) strand; PAM type: YTN; PAM sequence: TTT
atttatttatttatttattt

SEQ ID NO: 13690 - DNA, 20 bp, Artificial Sequence
  Description of Artificial Sequence: Synthetic oligonucleotide
  Target: ANGPTL4; (-) strand; PAM type: YTN; PAM sequence: TTA
tttatttatttatttattta

SEQ ID NO: 13691 - DNA, 20 bp, Artificial Sequence
  Description of Artificial Sequence: Synthetic oligonucleotide
  Target: ANGPTL4; (-) strand; PAM type: YTN; PAM sequence: TTT
atttatttatttatttattt

SEQ ID NO: 13692 - DNA, 20 bp, Artificial Sequence
  Description of Artificial Sequence: Synthetic oligonucleotide
  Target: ANGPTL4; (-) strand; PAM type: YTN; PAM sequence: TTT
tatttatttatttatttatt

SEQ ID NO: 13693 - DNA, 20 bp, Artificial Sequence
  Description of Artificial Sequence: Synthetic oligonucleotide
  Target: ANGPTL4; (-) strand; PAM type: YTN; PAM sequence: TTT
ttatttatttatttatttat

SEQ ID NO: 13694 - DNA, 20 bp, Artificial Sequence
  Description of Artificial Sequence: Synthetic oligonucleotide
  Target: ANGPTL4; (-) strand; PAM type: YTN; PAM sequence: TTT
tttatttatttatttattta

SEQ ID NO: 13695 - DNA, 20 bp, Artificial Sequence
  Description of Artificial Sequence: Synthetic oligonucleotide
  Target: ANGPTL4; (-) strand; PAM type: YTN; PAM sequence: TTA
ttttttatttatttatttat

SEQ ID NO: 13696 - DNA, 20 bp, Artificial Sequence
  Description of Artificial Sequence: Synthetic oligonucleotide
  Target: ANGPTL4; (-) strand; PAM type: YTN; PAM sequence: TTT
attttttatttatttattta

SEQ ID NO: 13697 - DNA, 20 bp, Artificial Sequence
  Description of Artificial Sequence: Synthetic oligonucleotide
  Target: ANGPTL4; (-) strand; PAM type: YTN; PAM sequence: CTT
tattttttatttatttattt

SEQ ID NO: 13698 - DNA, 20 bp, Artificial Sequence
  Description of Artificial Sequence: Synthetic oligonucleotide
  Target: ANGPTL4; (-) strand; PAM type: YTN; PAM sequence: CTC
tttattttttatttatttat

SEQ ID NO: 13699 - DNA, 20 bp, Artificial Sequence
  Description of Artificial Sequence: Synthetic oligonucleotide
  Target: ANGPTL4; (-) strand; PAM type: YTN; PAM sequence: CTG
ctctttattttttatttatt

SEQ ID NO: 13700 - DNA, 20 bp, Artificial Sequence
  Description of Artificial Sequence: Synthetic oligonucleotide
  Target: ANGPTL4; (-) strand; PAM type: YTN; PAM sequence: CTA
aaaactgctctttatttttt

SEQ ID NO: 13701 - DNA, 20 bp, Artificial Sequence
  Description of Artificial Sequence: Synthetic oligonucleotide
  Target: ANGPTL4; (-) strand; PAM type: YTN; PAM sequence: TTC
taaaaactgctctttatttt

SEQ ID NO: 13702 - DNA, 20 bp, Artificial Sequence
  Description of Artificial Sequence: Synthetic oligonucleotide
  Target: ANGPTL4; (-) strand; PAM type: YTN; PAM sequence: TTA
ttctaaaaactgctctttat

SEQ ID NO: 13703 - DNA, 20 bp, Artificial Sequence
  Description of Artificial Sequence: Synthetic oligonucleotide
  Target: ANGPTL4; (-) strand; PAM type: YTN; PAM sequence: TTT
attctaaaaactgctcttta

SEQ ID NO: 13704 - DNA, 20 bp, Artificial Sequence
  Description of Artificial Sequence: Synthetic oligonucleotide
  Target: ANGPTL4; (-) strand; PAM type: YTN; PAM sequence: TTT
tattctaaaaactgctcttt

SEQ ID NO: 13705 - DNA, 20 bp, Artificial Sequence
  Description of Artificial Sequence: Synthetic oligonucleotide
  Target: ANGPTL4; (-) strand; PAM type: YTN; PAM sequence: CTA
gattttattctaaaaactgc

SEQ ID NO: 13706 - DNA, 20 bp, Artificial Sequence
  Description of Artificial Sequence: Synthetic oligonucleotide
  Target: ANGPTL4; (-) strand; PAM type: YTN; PAM sequence: CTC
tagattttattctaaaaact

SEQ ID NO: 13707 - DNA, 20 bp, Artificial Sequence
  Description of Artificial Sequence: Synthetic oligonucleotide
  Target: ANGPTL4; (-) strand; PAM type: YTN; PAM sequence: TTG
gctctagattttattctaaa

SEQ ID NO: 13708 - DNA, 20 bp, Artificial Sequence
  Description of Artificial Sequence: Synthetic oligonucleotide
  Target: ANGPTL4; (-) strand; PAM type: YTN; PAM sequence: CTC
aagttggctctagattttat

SEQ ID NO: 13709 - DNA, 20 bp, Artificial Sequence
  Description of Artificial Sequence: Synthetic oligonucleotide
  Target: ANGPTL4; (-) strand; PAM type: YTN; PAM sequence: CTG
tcgcctcaagttggctctag

SEQ ID NO: 13710 - DNA, 20 bp, Artificial Sequence
  Description of Artificial Sequence: Synthetic oligonucleotide
  Target: ANGPTL4; (-) strand; PAM type: YTN; PAM sequence: CTA
tactgtcgcctcaagttggc

SEQ ID NO: 13711 - DNA, 20 bp, Artificial Sequence
  Description of Artificial Sequence: Synthetic oligonucleotide
  Target: ANGPTL4; (-) strand; PAM type: YTN; PAM sequence: CTA
caaaagagtctatactgtcg

SEQ ID NO: 13712 - DNA, 20 bp, Artificial Sequence
  Description of Artificial Sequence: Synthetic oligonucleotide
  Target: ANGPTL4; (-) strand; PAM type: YTN; PAM sequence: CTG
tgagcaatctacaaaagagt

SEQ ID NO: 13713 - DNA, 20 bp, Artificial Sequence
  Description of Artificial Sequence: Synthetic oligonucleotide
  Target: ANGPTL4; (-) strand; PAM type: YTN; PAM sequence: CTG
ctgtgagcaatctacaaaag

SEQ ID NO: 13714 - DNA, 20 bp, Artificial Sequence
  Description of Artificial Sequence: Synthetic oligonucleotide
  Target: ANGPTL4; (-) strand; PAM type: YTN; PAM sequence: TTA
agggcacctgctgtgagcaa

SEQ ID NO: 13715 - DNA, 20 bp, Artificial Sequence
  Description of Artificial Sequence: Synthetic oligonucleotide
  Target: ANGPTL4; (-) strand; PAM type: YTN; PAM sequence: CTT
aagggcacctgctgtgagca

SEQ ID NO: 13716 - DNA, 20 bp, Artificial Sequence
  Description of Artificial Sequence: Synthetic oligonucleotide
  Target: ANGPTL4; (-) strand; PAM type: YTN; PAM sequence: TTG
gagccatgtgtcccacagca

SEQ ID NO: 13717 - DNA, 20 bp, Artificial Sequence
  Description of Artificial Sequence: Synthetic oligonucleotide
  Target: ANGPTL4; (-) strand; PAM type: YTN; PAM sequence: TTT
ggagccatgtgtcccacagc

SEQ ID NO: 13718 - DNA, 20 bp, Artificial Sequence
  Description of Artificial Sequence: Synthetic oligonucleotide
  Target: ANGPTL4; (-) strand; PAM type: YTN; PAM sequence: CTT
tggagccatgtgtcccacag

SEQ ID NO: 13719 - DNA, 20 bp, Artificial Sequence
  Description of Artificial Sequence: Synthetic oligonucleotide
  Target: ANGPTL4; (-) strand; PAM type: YTN; PAM sequence: TTC
tttggagccatgtgtcccac

SEQ ID NO: 13720 - DNA, 20 bp, Artificial Sequence
  Description of Artificial Sequence: Synthetic oligonucleotide
  Target: ANGPTL4; (-) strand; PAM type: YTN; PAM sequence: CTT
ctttggagccatgtgtccca

SEQ ID NO: 13721 - DNA, 20 bp, Artificial Sequence
  Description of Artificial Sequence: Synthetic oligonucleotide
  Target: ANGPTL4; (-) strand; PAM type: YTN; PAM sequence: TTC
agggacttctttggagccat

SEQ ID NO: 13722 - DNA, 20 bp, Artificial Sequence
  Description of Artificial Sequence: Synthetic oligonucleotide
  Target: ANGPTL4; (-) strand; PAM type: YTN; PAM sequence: TTT
cagggacttctttggagcca

SEQ ID NO: 13723 - DNA, 20 bp, Artificial Sequence
  Description of Artificial Sequence: Synthetic oligonucleotide
  Target: ANGPTL4; (-) strand; PAM type: YTN; PAM sequence: TTT
tcagggacttctttggagcc

SEQ ID NO: 13724 - DNA, 20 bp, Artificial Sequence
  Description of Artificial Sequence: Synthetic oligonucleotide
  Target: ANGPTL4; (-) strand; PAM type: YTN; PAM sequence: CTG
attttcagggacttctttgg

SEQ ID NO: 13725 - DNA, 20 bp, Artificial Sequence
  Description of Artificial Sequence: Synthetic oligonucleotide
  Target: ANGPTL4; (-) strand; PAM type: YTN; PAM sequence: TTC
atgatctgattttcagggac

SEQ ID NO: 13726 - DNA, 20 bp, Artificial Sequence
  Description of Artificial Sequence: Synthetic oligonucleotide
  Target: ANGPTL4; (-) strand; PAM type: YTN; PAM sequence: TTT
catgatctgattttcaggga

SEQ ID NO: 13727 - DNA, 20 bp, Artificial Sequence
  Description of Artificial Sequence: Synthetic oligonucleotide
  Target: ANGPTL4; (-) strand; PAM type: YTN; PAM sequence: TTT
tcatgatctgattttcaggg

SEQ ID NO: 13728 - DNA, 20 bp, Artificial Sequence
  Description of Artificial Sequence: Synthetic oligonucleotide
  Target: ANGPTL4; (-) strand; PAM type: YTN; PAM sequence: CTT
ttcatgatctgattttcagg

SEQ ID NO: 13729 - DNA, 20 bp, Artificial Sequence
  Description of Artificial Sequence: Synthetic oligonucleotide
  Target: ANGPTL4; (-) strand; PAM type: YTN; PAM sequence: CTG
atgaccttttcatgatctga

SEQ ID NO: 13730 - DNA, 20 bp, Artificial Sequence
  Description of Artificial Sequence: Synthetic oligonucleotide
  Target: ANGPTL4; (-) strand; PAM type: YTN; PAM sequence: TTC
cccaacctgatgaccttttc

SEQ ID NO: 13731 - DNA, 20 bp, Artificial Sequence
  Description of Artificial Sequence: Synthetic oligonucleotide
  Target: ANGPTL4; (-) strand; PAM type: YTN; PAM sequence: CTT
ccccaacctgatgacctttt

SEQ ID NO: 13732 - DNA, 20 bp, Artificial Sequence
  Description of Artificial Sequence: Synthetic oligonucleotide
  Target: ANGPTL4; (-) strand; PAM type: YTN; PAM sequence: TTA
cttccccaacctgatgacct

SEQ ID NO: 13733 - DNA, 20 bp, Artificial Sequence
  Description of Artificial Sequence: Synthetic oligonucleotide
  Target: ANGPTL4; (-) strand; PAM type: YTN; PAM sequence: CTG
atcaattacttccccaacct

SEQ ID NO: 13734 - DNA, 20 bp, Artificial Sequence
  Description of Artificial Sequence: Synthetic oligonucleotide
  Target: ANGPTL4; (-) strand; PAM type: YTN; PAM sequence: CTG
agagaactgatcaattactt

SEQ ID NO: 13735 - DNA, 20 bp, Artificial Sequence
  Description of Artificial Sequence: Synthetic oligonucleotide
  Target: ANGPTL4; (-) strand; PAM type: YTN; PAM sequence: TTA
aactgagagaactgatcaat

SEQ ID NO: 13736 - DNA, 20 bp, Artificial Sequence
  Description of Artificial Sequence: Synthetic oligonucleotide
  Target: ANGPTL4; (-) strand; PAM type: YTN; PAM sequence: CTT
aaactgagagaactgatcaa

SEQ ID NO: 13737 - DNA, 20 bp, Artificial Sequence
  Description of Artificial Sequence: Synthetic oligonucleotide
  Target: ANGPTL4; (-) strand; PAM type: YTN; PAM sequence: TTC
ttaaactgagagaactgatc

SEQ ID NO: 13738 - DNA, 20 bp, Artificial Sequence
  Description of Artificial Sequence: Synthetic oligonucleotide
  Target: ANGPTL4; (-) strand; PAM type: YTN; PAM sequence: CTT
cttaaactgagagaactgat

SEQ ID NO: 13739 - DNA, 20 bp, Artificial Sequence
  Description of Artificial Sequence: Synthetic oligonucleotide
  Target: ANGPTL4; (-) strand; PAM type: YTN; PAM sequence: TTC
cccaccttcttaaactgaga

SEQ ID NO: 13740 - DNA, 20 bp, Artificial Sequence
  Description of Artificial Sequence: Synthetic oligonucleotide
  Target: ANGPTL4; (-) strand; PAM type: YTN; PAM sequence: CTT
ccccaccttcttaaactgag

SEQ ID NO: 13741 - DNA, 20 bp, Artificial Sequence
  Description of Artificial Sequence: Synthetic oligonucleotide
  Target: ANGPTL4; (-) strand; PAM type: YTN; PAM sequence: CTC
ttccccaccttcttaaactg

SEQ ID NO: 13742 - DNA, 20 bp, Artificial Sequence
  Description of Artificial Sequence: Synthetic oligonucleotide
  Target: ANGPTL4; (-) strand; PAM type: YTN; PAM sequence: CTC
ctcttccccaccttcttaaa

SEQ ID NO: 13743 - DNA, 20 bp, Artificial Sequence
  Description of Artificial Sequence: Synthetic oligonucleotide
  Target: ANGPTL4; (-) strand; PAM type: YTN; PAM sequence: CTC
ctcctcttccccaccttctt

SEQ ID NO: 13744 - DNA, 20 bp, Artificial Sequence
  Description of Artificial Sequence: Synthetic oligonucleotide
  Target: ANGPTL4; (-) strand; PAM type: YTN; PAM sequence: CTA
tcccagaatgcaagctcctc

SEQ ID NO: 13745 - DNA, 20 bp, Artificial Sequence
  Description of Artificial Sequence: Synthetic oligonucleotide
  Target: ANGPTL4; (-) strand; PAM type: YTN; PAM sequence: CTA
tcccaggctatcccagaatg

SEQ ID NO: 13746 - DNA, 20 bp, Artificial Sequence
  Description of Artificial Sequence: Synthetic oligonucleotide
  Target: ANGPTL4; (-) strand; PAM type: YTN; PAM sequence: CTG
agtagggacacagctatccc

SEQ ID NO: 13747 - DNA, 20 bp, Artificial Sequence
  Description of Artificial Sequence: Synthetic oligonucleotide
  Target: ANGPTL4; (-) strand; PAM type: YTN; PAM sequence: CTC
tgagtagggacacagctatc

SEQ ID NO: 13748 - DNA, 20 bp, Artificial Sequence
  Description of Artificial Sequence: Synthetic oligonucleotide
  Target: ANGPTL4; (-) strand; PAM type: YTN; PAM sequence: CTC
tctgagtagggacacagcta

SEQ ID NO: 13749 - DNA, 20 bp, Artificial Sequence
  Description of Artificial Sequence: Synthetic oligonucleotide
  Target: ANGPTL4; (-) strand; PAM type: YTN; PAM sequence: CTC
tctctgagtagggacacagc

SEQ ID NO: 13750 - DNA, 20 bp, Artificial Sequence
  Description of Artificial Sequence: Synthetic oligonucleotide
  Target: ANGPTL4; (-) strand; PAM type: YTN; PAM sequence: CTG
tccacccccaagcccccagc

SEQ ID NO: 13751 - DNA, 20 bp, Artificial Sequence
  Description of Artificial Sequence: Synthetic oligonucleotide
  Target: ANGPTL4; (-) strand; PAM type: YTN; PAM sequence: CTG
gcctgtccacccccaagccc

SEQ ID NO: 13752 - DNA, 20 bp, Artificial Sequence
  Description of Artificial Sequence: Synthetic oligonucleotide
  Target: ANGPTL4; (-) strand; PAM type: YTN; PAM sequence: TTC
agatggtcaccgtctggcct

SEQ ID NO: 13753 - DNA, 20 bp, Artificial Sequence
  Description of Artificial Sequence: Synthetic oligonucleotide
  Target: ANGPTL4; (-) strand; PAM type: YTN; PAM sequence: CTC
ccagcagcagtggacaggaa

SEQ ID NO: 13754 - DNA, 20 bp, Artificial Sequence
  Description of Artificial Sequence: Synthetic oligonucleotide
  Target: ANGPTL4; (-) strand; PAM type: YTN; PAM sequence: CTG
ggccagatgccaggacagca

SEQ ID NO: 13755 - DNA, 20 bp, Artificial Sequence
  Description of Artificial Sequence: Synthetic oligonucleotide
  Target: ANGPTL4; (-) strand; PAM type: YTN; PAM sequence: TTG
gccccgtcagctgggccaga

SEQ ID NO: 13756 - DNA, 20 bp, Artificial Sequence
  Description of Artificial Sequence: Synthetic oligonucleotide
  Target: ANGPTL4; (-) strand; PAM type: YTN; PAM sequence: CTT
ggccccgtcagctgggccag

SEQ ID NO: 13757 - DNA, 20 bp, Artificial Sequence
  Description of Artificial Sequence: Synthetic oligonucleotide
  Target: ANGPTL4; (-) strand; PAM type: YTN; PAM sequence: CTC
atacacttggccccgtcagc

SEQ ID NO: 13758 - DNA, 20 bp, Artificial Sequence
  Description of Artificial Sequence: Synthetic oligonucleotide
  Target: ANGPTL4; (-) strand; PAM type: YTN; PAM sequence: CTG
ccactcatacacttggcccc

SEQ ID NO: 13759 - DNA, 20 bp, Artificial Sequence
  Description of Artificial Sequence: Synthetic oligonucleotide
  Target: ANGPTL4; (-) strand; PAM type: YTN; PAM sequence: CTG
acgtgcaggctgccactcat

SEQ ID NO: 13760 - DNA, 20 bp, Artificial Sequence
  Description of Artificial Sequence: Synthetic oligonucleotide
  Target: ANGPTL4; (-) strand; PAM type: YTN; PAM sequence: CTG
cacacccaagggctgacgtg

SEQ ID NO: 13761 - DNA, 20 bp, Artificial Sequence
  Description of Artificial Sequence: Synthetic oligonucleotide
  Target: ANGPTL4; (-) strand; PAM type: YTN; PAM sequence: CTG
aaactgcacacccaagggct

SEQ ID NO: 13762 - DNA, 20 bp, Artificial Sequence
  Description of Artificial Sequence: Synthetic oligonucleotide
  Target: ANGPTL4; (-) strand; PAM type: YTN; PAM sequence: CTG
gaatctgaaactgcacaccc

SEQ ID NO: 13763 - DNA, 20 bp, Artificial Sequence
  Description of Artificial Sequence: Synthetic oligonucleotide
  Target: ANGPTL4; (-) strand; PAM type: YTN; PAM sequence: CTC
tggaatctgaaactgcacac

SEQ ID NO: 13764 - DNA, 20 bp, Artificial Sequence
  Description of Artificial Sequence: Synthetic oligonucleotide
  Target: ANGPTL4; (-) strand; PAM type: YTN; PAM sequence: TTC
tctggaatctgaaactgcac

SEQ ID NO: 13765 - DNA, 20 bp, Artificial Sequence
  Description of Artificial Sequence: Synthetic oligonucleotide
  Target: ANGPTL4; (-) strand; PAM type: YTN; PAM sequence: CTC
attctctggaatctgaaact

SEQ ID NO: 13766 - DNA, 20 bp, Artificial Sequence
  Description of Artificial Sequence: Synthetic oligonucleotide
  Target: ANGPTL4; (-) strand; PAM type: YTN; PAM sequence: CTC
caagccagctcattctctgg

SEQ ID NO: 13767 - DNA, 20 bp, Artificial Sequence
  Description of Artificial Sequence: Synthetic oligonucleotide
  Target: ANGPTL4; (-) strand; PAM type: YTN; PAM sequence: CTC
agcagggctccaagccagct

SEQ ID NO: 13768 - DNA, 20 bp, Artificial Sequence
  Description of Artificial Sequence: Synthetic oligonucleotide
  Target: ANGPTL4; (-) strand; PAM type: YTN; PAM sequence: TTG
actcagcagggctccaagcc

SEQ ID NO: 13769 - DNA, 20 bp, Artificial Sequence
  Description of Artificial Sequence: Synthetic oligonucleotide
  Target: ANGPTL4; (-) strand; PAM type: YTN; PAM sequence: CTG
gcaaggagaagggcattgac

SEQ ID NO: 13770 - DNA, 20 bp, Artificial Sequence
  Description of Artificial Sequence: Synthetic oligonucleotide
  Target: ANGPTL4; (-) strand; PAM type: YTN; PAM sequence: CTC
agagcactggcaaggagaag

SEQ ID NO: 13771 - DNA, 20 bp, Artificial Sequence
  Description of Artificial Sequence: Synthetic oligonucleotide
  Target: ANGPTL4; (-) strand; PAM type: YTN; PAM sequence: TTG
gctcagagcactggcaagga

SEQ ID NO: 13772 - DNA, 20 bp, Artificial Sequence
  Description of Artificial Sequence: Synthetic oligonucleotide
  Target: ANGPTL4; (-) strand; PAM type: YTN; PAM sequence: CTC
ggggcaggttggctcagagc

SEQ ID NO: 13773 - DNA, 20 bp, Artificial Sequence
  Description of Artificial Sequence: Synthetic oligonucleotide
  Target: ANGPTL4; (-) strand; PAM type: YTN; PAM sequence: CTG
ccaggaagaactcggggcag

SEQ ID NO: 13774 - DNA, 20 bp, Artificial Sequence
  Description of Artificial Sequence: Synthetic oligonucleotide
  Target: ANGPTL4; (-) strand; PAM type: YTN; PAM sequence: CTG
gcacagaaaaccagcctgcc

SEQ ID NO: 13775 - DNA, 20 bp, Artificial Sequence
  Description of Artificial Sequence: Synthetic oligonucleotide
  Target: ANGPTL4; (-) strand; PAM type: YTN; PAM sequence: CTG
tcaggaaggggaggctggca

SEQ ID NO: 13776 - DNA, 20 bp, Artificial Sequence
  Description of Artificial Sequence: Synthetic oligonucleotide
  Target: ANGPTL4; (-) strand; PAM type: YTN; PAM sequence: CTA
taccctgtcaggaaggggag

SEQ ID NO: 13777 - DNA, 20 bp, Artificial Sequence
  Description of Artificial Sequence: Synthetic oligonucleotide
  Target: ANGPTL4; (-) strand; PAM type: YTN; PAM sequence: TTC
ccctataccctgtcaggaag

SEQ ID NO: 13778 - DNA, 20 bp, Artificial Sequence
  Description of Artificial Sequence: Synthetic oligonucleotide
  Target: ANGPTL4; (-) strand; PAM type: YTN; PAM sequence: CTA
cccattcccctataccctgt

SEQ ID NO: 13779 - DNA, 20 bp, Artificial Sequence
  Description of Artificial Sequence: Synthetic oligonucleotide
  Target: ANGPTL4; (-) strand; PAM type: YTN; PAM sequence: TTC
cctacccattcccctatacc

SEQ ID NO: 13780 - DNA, 20 bp, Artificial Sequence
  Description of Artificial Sequence: Synthetic oligonucleotide
  Target: ANGPTL4; (-) strand; PAM type: YTN; PAM sequence: CTT
ccctacccattcccctatac

SEQ ID NO: 13781 - DNA, 20 bp, Artificial Sequence
  Description of Artificial Sequence: Synthetic oligonucleotide
  Target: ANGPTL4; (-) strand; PAM type: YTN; PAM sequence: CTC
ttccctacccattcccctat

SEQ ID NO: 13782 - DNA, 20 bp, Artificial Sequence
  Description of Artificial Sequence: Synthetic oligonucleotide
  Target: ANGPTL4; (-) strand; PAM type: YTN; PAM sequence: CTG
cctcttccctacccattccc

SEQ ID NO: 13783 - DNA, 20 bp, Artificial Sequence
  Description of Artificial Sequence: Synthetic oligonucleotide
  Target: ANGPTL4; (-) strand; PAM type: YTN; PAM sequence: CTC
tgcctcttccctacccattc

SEQ ID NO: 13784 - DNA, 20 bp, Artificial Sequence
  Description of Artificial Sequence: Synthetic oligonucleotide
  Target: ANGPTL4; (-) strand; PAM type: YTN; PAM sequence: CTC
ctctgcctcttccctaccca

SEQ ID NO: 13785 - DNA, 20 bp, Artificial Sequence
  Description of Artificial Sequence: Synthetic oligonucleotide
  Target: ANGPTL4; (-) strand; PAM type: YTN; PAM sequence: TTG
caccgatctcctctgcctct

SEQ ID NO: 13786 - DNA, 20 bp, Artificial Sequence
  Description of Artificial Sequence: Synthetic oligonucleotide
  Target: ANGPTL4; (-) strand; PAM type: YTN; PAM sequence: CTT
gcaccgatctcctctgcctc

SEQ ID NO: 13787 - DNA, 20 bp, Artificial Sequence
  Description of Artificial Sequence: Synthetic oligonucleotide
  Target: ANGPTL4; (-) strand; PAM type: YTN; PAM sequence: TTC
aaacttgcaccgatctcctc

SEQ ID NO: 13788 - DNA, 20 bp, Artificial Sequence
  Description of Artificial Sequence: Synthetic oligonucleotide
  Target: ANGPTL4; (-) strand; PAM type: YTN; PAM sequence: TTC
attcaaacttgcaccgatct

SEQ ID NO: 13789 - DNA, 20 bp, Artificial Sequence
  Description of Artificial Sequence: Synthetic oligonucleotide
  Target: ANGPTL4; (-) strand; PAM type: YTN; PAM sequence: CTA
agtgttcattcaaacttgca

SEQ ID NO: 13790 - DNA, 20 bp, Artificial Sequence
  Description of Artificial Sequence: Synthetic oligonucleotide
  Target: ANGPTL4; (-) strand; PAM type: YTN; PAM sequence: TTC
cacagggctaagtgttcatt

SEQ ID NO: 13791 - DNA, 20 bp, Artificial Sequence
  Description of Artificial Sequence: Synthetic oligonucleotide
  Target: ANGPTL4; (-) strand; PAM type: YTN; PAM sequence: TTC
attccacagggctaagtgtt

SEQ ID NO: 13792 - DNA, 20 bp, Artificial Sequence
  Description of Artificial Sequence: Synthetic oligonucleotide
  Target: ANGPTL4; (-) strand; PAM type: YTN; PAM sequence: CTG
gaccacattcattccacagg

SEQ ID NO: 13793 - DNA, 20 bp, Artificial Sequence
  Description of Artificial Sequence: Synthetic oligonucleotide
  Target: ANGPTL4; (-) strand; PAM type: YTN; PAM sequence: CTA
aagggctggaccacattcat

SEQ ID NO: 13794 - DNA, 20 bp, Artificial Sequence
  Description of Artificial Sequence: Synthetic oligonucleotide
  Target: ANGPTL4; (-) strand; PAM type: YTN; PAM sequence: CTG
agtgaggctaaagggctgga

SEQ ID NO: 13795 - DNA, 20 bp, Artificial Sequence
  Description of Artificial Sequence: Synthetic oligonucleotide
  Target: ANGPTL4; (-) strand; PAM type: YTN; PAM sequence: TTG
ggacaaaggaagtactgagt

SEQ ID NO: 13796 - DNA, 20 bp, Artificial Sequence
  Description of Artificial Sequence: Synthetic oligonucleotide
  Target: ANGPTL4; (-) strand; PAM type: YTN; PAM sequence: CTG
gggtagggatagagttggga

SEQ ID NO: 13797 - DNA, 20 bp, Artificial Sequence
  Description of Artificial Sequence: Synthetic oligonucleotide
  Target: ANGPTL4; (-) strand; PAM type: YTN; PAM sequence: CTG
agcctggggtagggatagag

SEQ ID NO: 13798 - DNA, 20 bp, Artificial Sequence
  Description of Artificial Sequence: Synthetic oligonucleotide
  Target: ANGPTL4; (-) strand; PAM type: YTN; PAM sequence: TTC
tgagcctggggtagggatag

SEQ ID NO: 13799 - DNA, 20 bp, Artificial Sequence
  Description of Artificial Sequence: Synthetic oligonucleotide
  Target: ANGPTL4; (-) strand; PAM type: YTN; PAM sequence: CTC
aggcaggtggagatacccca

SEQ ID NO: 13800 - DNA, 20 bp, Artificial Sequence
  Description of Artificial Sequence: Synthetic oligonucleotide
  Target: ANGPTL4; (-) strand; PAM type: YTN; PAM sequence: TTC
tcaggcaggtggagataccc

SEQ ID NO: 13801 - DNA, 20 bp, Artificial Sequence
  Description of Artificial Sequence: Synthetic oligonucleotide
  Target: ANGPTL4; (-) strand; PAM type: YTN; PAM sequence: TTG
aagttctcaggcaggtggag

SEQ ID NO: 13802 - DNA, 20 bp, Artificial Sequence
  Description of Artificial Sequence: Synthetic oligonucleotide
  Target: ANGPTL4; (-) strand; PAM type: YTN; PAM sequence: TTT
gaagttctcaggcaggtgga

SEQ ID NO: 13803 - DNA, 20 bp, Artificial Sequence
  Description of Artificial Sequence: Synthetic oligonucleotide
  Target: ANGPTL4; (-) strand; PAM type: YTN; PAM sequence: CTG
tatgtttgaagttctcaggc

SEQ ID NO: 13804 - DNA, 20 bp, Artificial Sequence
  Description of Artificial Sequence: Synthetic oligonucleotide
  Target: ANGPTL4; (-) strand; PAM type: YTN; PAM sequence: CTA
agcccagcccctgtatgttt

SEQ ID NO: 13805 - DNA, 20 bp, Artificial Sequence
  Description of Artificial Sequence: Synthetic oligonucleotide
  Target: ANGPTL4; (-) strand; PAM type: YTN; PAM sequence: CTC
taagcccagcccctgtatgt

SEQ ID NO: 13806 - DNA, 20 bp, Artificial Sequence
  Description of Artificial Sequence: Synthetic oligonucleotide
  Target: ANGPTL4; (-) strand; PAM type: YTN; PAM sequence: CTG
ccctctaagcccagcccctg

SEQ ID NO: 13807 - DNA, 20 bp, Artificial Sequence
  Description of Artificial Sequence: Synthetic oligonucleotide
  Target: ANGPTL4; (-) strand; PAM type: YTN; PAM sequence: CTG
ctgccctctaagcccagccc

SEQ ID NO: 13808 - DNA, 20 bp, Artificial Sequence
  Description of Artificial Sequence: Synthetic oligonucleotide
  Target: ANGPTL4; (-) strand; PAM type: YTN; PAM sequence: CTG
aacgaaggtgctgctgccct

SEQ ID NO: 13809 - DNA, 20 bp, Artificial Sequence
  Description of Artificial Sequence: Synthetic oligonucleotide
  Target: ANGPTL4; (-) strand; PAM type: YTN; PAM sequence: CTC
atgcactgaacgaaggtgct

SEQ ID NO: 13810 - DNA, 20 bp, Artificial Sequence
  Description of Artificial Sequence: Synthetic oligonucleotide
  Target: ANGPTL4; (-) strand; PAM type: YTN; PAM sequence: TTC
actcatgcactgaacgaagg

SEQ ID NO: 13811 - DNA, 20 bp, Artificial Sequence
  Description of Artificial Sequence: Synthetic oligonucleotide
  Target: ANGPTL4; (-) strand; PAM type: YTN; PAM sequence: TTC
attcactcatgcactgaacg

SEQ ID NO: 13812 - DNA, 20 bp, Artificial Sequence
  Description of Artificial Sequence: Synthetic oligonucleotide
  Target: ANGPTL4; (-) strand; PAM type: YTN; PAM sequence: TTC
attcattcactcatgcactg

SEQ ID NO: 13813 - DNA, 20 bp, Artificial Sequence
  Description of Artificial Sequence: Synthetic oligonucleotide
  Target: ANGPTL4; (-) strand; PAM type: YTN; PAM sequence: CTC
attcattcattcactcatgc

SEQ ID NO: 13814 - DNA, 20 bp, Artificial Sequence
  Description of Artificial Sequence: Synthetic oligonucleotide
  Target: ANGPTL4; (-) strand; PAM type: YTN; PAM sequence: CTC
cctcattcattcattcactc

SEQ ID NO: 13815 - DNA, 20 bp, Artificial Sequence
  Description of Artificial Sequence: Synthetic oligonucleotide
  Target: ANGPTL4; (-) strand; PAM type: YTN; PAM sequence: CTC
tccctcattcattcattcac

SEQ ID NO: 13816 - DNA, 20 bp, Artificial Sequence
  Description of Artificial Sequence: Synthetic oligonucleotide
  Target: ANGPTL4; (-) strand; PAM type: YTN; PAM sequence: TTC
tctccctcattcattcattc

SEQ ID NO: 13817 - DNA, 20 bp, Artificial Sequence
  Description of Artificial Sequence: Synthetic oligonucleotide
  Target: ANGPTL4; (-) strand; PAM type: YTN; PAM sequence: TTT
ctctccctcattcattcatt

SEQ ID NO: 13818 - DNA, 20 bp, Artificial Sequence
  Description of Artificial Sequence: Synthetic oligonucleotide
  Target: ANGPTL4; (-) strand; PAM type: YTN; PAM sequence: CTT
tctctccctcattcattcat

SEQ ID NO: 13819 - DNA, 20 bp, Artificial Sequence
  Description of Artificial Sequence: Synthetic oligonucleotide
  Target: ANGPTL4; (-) strand; PAM type: YTN; PAM sequence: CTC
tttctctccctcattcattc

SEQ ID NO: 13820 - DNA, 20 bp, Artificial Sequence
  Description of Artificial Sequence: Synthetic oligonucleotide
  Target: ANGPTL4; (-) strand; PAM type: YTN; PAM sequence: TTC
ctctttctctccctcattca

SEQ ID NO: 13821 - DNA, 20 bp, Artificial Sequence
  Description of Artificial Sequence: Synthetic oligonucleotide
  Target: ANGPTL4; (-) strand; PAM type: YTN; PAM sequence: CTT
cctctttctctccctcattc

SEQ ID NO: 13822 - DNA, 20 bp, Artificial Sequence
  Description of Artificial Sequence: Synthetic oligonucleotide
  Target: ANGPTL4; (-) strand; PAM type: YTN; PAM sequence: TTC
agacatggaagaccttcctc

SEQ ID NO: 13823 - DNA, 20 bp, Artificial Sequence
  Description of Artificial Sequence: Synthetic oligonucleotide
  Target: ANGPTL4; (-) strand; PAM type: YTN; PAM sequence: TTT
cagacatggaagaccttcct

SEQ ID NO: 13824 - DNA, 20 bp, Artificial Sequence
  Description of Artificial Sequence: Synthetic oligonucleotide
  Target: ANGPTL4; (-) strand; PAM type: YTN; PAM sequence: CTG
tgtgtcaaaaaaaaaaaaaa

SEQ ID NO: 13825 - DNA, 20 bp, Artificial Sequence
  Description of Artificial Sequence: Synthetic oligonucleotide
  Target: ANGPTL4; (-) strand; PAM type: YTN; PAM sequence: CTG
ggtgacagagtgagactgtg

SEQ ID NO: 13826 - DNA, 20 bp, Artificial Sequence
  Description of Artificial Sequence: Synthetic oligonucleotide
  Target: ANGPTL4; (-) strand; PAM type: YTN; PAM sequence: CTC
cagcctgggtgacagagtga

SEQ ID NO: 13827 - DNA, 20 bp, Artificial Sequence
  Description of Artificial Sequence: Synthetic oligonucleotide
  Target: ANGPTL4; (-) strand; PAM type: YTN; PAM sequence: TTG
caccacagcactccagcctg

SEQ ID NO: 13828 - DNA, 20 bp, Artificial Sequence
  Description of Artificial Sequence: Synthetic oligonucleotide
  Target: ANGPTL4; (-) strand; PAM type: YTN; PAM sequence: CTG
agattgcaccacagcactcc

SEQ ID NO: 13829 - DNA, 20 bp, Artificial Sequence
  Description of Artificial Sequence: Synthetic oligonucleotide
  Target: ANGPTL4; (-) strand; PAM type: YTN; PAM sequence: TTG
cagtgagctgagattgcacc

SEQ ID NO: 13830 - DNA, 20 bp, Artificial Sequence
  Description of Artificial Sequence: Synthetic oligonucleotide
  Target: ANGPTL4; (-) strand; PAM type: YTN; PAM sequence: CTC
aggagacggaggttgcagtg

SEQ ID NO: 13831 - DNA, 20 bp, Artificial Sequence
  Description of Artificial Sequence: Synthetic oligonucleotide
  Target: ANGPTL4; (-) strand; PAM type: YTN; PAM sequence: TTG
aactcaggagacggaggttg

SEQ ID NO: 13832 - DNA, 20 bp, Artificial Sequence
  Description of Artificial Sequence: Synthetic oligonucleotide
  Target: ANGPTL4; (-) strand; PAM type: YTN; PAM sequence: CTT
gaactcaggagacggaggtt

SEQ ID NO: 13833 - DNA, 20 bp, Artificial Sequence
  Description of Artificial Sequence: Synthetic oligonucleotide
  Target: ANGPTL4; (-) strand; PAM type: YTN; PAM sequence: CTG
tgtcaggagaatcgcttgaa

SEQ ID NO: 13834 - DNA, 20 bp, Artificial Sequence
  Description of Artificial Sequence: Synthetic oligonucleotide
  Target: ANGPTL4; (-) strand; PAM type: YTN; PAM sequence: CTC
gggagactgtgtcaggagaa

SEQ ID NO: 13835 - DNA, 20 bp, Artificial Sequence
  Description of Artificial Sequence: Synthetic oligonucleotide
  Target: ANGPTL4; (-) strand; PAM type: YTN; PAM sequence: CTA
ctcgggagactgtgtcagga

SEQ ID NO: 13836 - DNA, 20 bp, Artificial Sequence
  Description of Artificial Sequence: Synthetic oligonucleotide
  Target: ANGPTL4; (-) strand; PAM type: YTN; PAM sequence: TTA
cagctactcgggagactgtg

SEQ ID NO: 13837 - DNA, 20 bp, Artificial Sequence
  Description of Artificial Sequence: Synthetic oligonucleotide
  Target: ANGPTL4; (-) strand; PAM type: YTN; PAM sequence: CTT
acagctactcgggagactgt

SEQ ID NO: 13838 - DNA, 20 bp, Artificial Sequence
  Description of Artificial Sequence: Synthetic oligonucleotide
  Target: ANGPTL4; (-) strand; PAM type: YTN; PAM sequence: TTA
gccgggtgtggtggcacgtg

SEQ ID NO: 13839 - DNA, 20 bp, Artificial Sequence
  Description of Artificial Sequence: Synthetic oligonucleotide
  Target: ANGPTL4; (-) strand; PAM type: YTN; PAM sequence: CTA
aaaataaaaaattagccggg

SEQ ID NO: 13840 - DNA, 20 bp, Artificial Sequence
  Description of Artificial Sequence: Synthetic oligonucleotide
  Target: ANGPTL4; (-) strand; PAM type: YTN; PAM sequence: CTA
ctaaaaataaaaaattagcc

SEQ ID NO: 13841 - DNA, 20 bp, Artificial Sequence
  Description of Artificial Sequence: Synthetic oligonucleotide
  Target: ANGPTL4; (-) strand; PAM type: YTN; PAM sequence: CTC
tactaaaaataaaaaattag

SEQ ID NO: 13842 - DNA, 20 bp, Artificial Sequence
  Description of Artificial Sequence: Synthetic oligonucleotide
  Target: ANGPTL4; (-) strand; PAM type: YTN; PAM sequence: CTC
gtctctactaaaaataaaaa

SEQ ID NO: 13843 - DNA, 20 bp, Artificial Sequence
  Description of Artificial Sequence: Synthetic oligonucleotide
  Target: ANGPTL4; (-) strand; PAM type: YTN; PAM sequence: CTG
gccaacatggtgaaacctcg

SEQ ID NO: 13844 - DNA, 20 bp, Artificial Sequence
  Description of Artificial Sequence: Synthetic oligonucleotide
  Target: ANGPTL4; (-) strand; PAM type: YTN; PAM sequence: TTC
gagatcagcctggccaacat

SEQ ID NO: 13845 - DNA, 20 bp, Artificial Sequence
  Description of Artificial Sequence: Synthetic oligonucleotide
  Target: ANGPTL4; (-) strand; PAM type: YTN; PAM sequence: CTG
aggtcaggggttcgagatca

SEQ ID NO: 13846 - DNA, 20 bp, Artificial Sequence
  Description of Artificial Sequence: Synthetic oligonucleotide
  Target: ANGPTL4; (-) strand; PAM type: YTN; PAM sequence: TTG
ggaggccgggtggtgggagg

SEQ ID NO: 13847 - DNA, 20 bp, Artificial Sequence
  Description of Artificial Sequence: Synthetic oligonucleotide
  Target: ANGPTL4; (-) strand; PAM type: YTN; PAM sequence: TTT
gggaggccgggtggtgggag

SEQ ID NO: 13848 - DNA, 20 bp, Artificial Sequence
  Description of Artificial Sequence: Synthetic oligonucleotide
  Target: ANGPTL4; (-) strand; PAM type: YTN; PAM sequence: CTT
tgggaggccgggtggtggga

SEQ ID NO: 13849 - DNA, 20 bp, Artificial Sequence
  Description of Artificial Sequence: Synthetic oligonucleotide
  Target: ANGPTL4; (-) strand; PAM type: YTN; PAM sequence: CTG
taatcccagcactttgggag

SEQ ID NO: 13850 - DNA, 20 bp, Artificial Sequence
  Description of Artificial Sequence: Synthetic oligonucleotide
  Target: ANGPTL4; (-) strand; PAM type: YTN; PAM sequence: CTC
acgcctgtaatcccagcact

SEQ ID NO: 13851 - DNA, 20 bp, Artificial Sequence
  Description of Artificial Sequence: Synthetic oligonucleotide
  Target: ANGPTL4; (-) strand; PAM type: YTN; PAM sequence: CTG
tggccaggcgcggtggctca

SEQ ID NO: 13852 - DNA, 20 bp, Artificial Sequence
  Description of Artificial Sequence: Synthetic oligonucleotide
  Target: ANGPTL4; (-) strand; PAM type: YTN; PAM sequence: CTA
aaaaagaaataaaataaaag

SEQ ID NO: 13853 - DNA, 20 bp, Artificial Sequence
  Description of Artificial Sequence: Synthetic oligonucleotide
  Target: ANGPTL4; (-) strand; PAM type: YTN; PAM sequence: CTC
taaaaaagaaataaaataaa

SEQ ID NO: 13854 - DNA, 20 bp, Artificial Sequence
  Description of Artificial Sequence: Synthetic oligonucleotide
  Target: ANGPTL4; (-) strand; PAM type: YTN; PAM sequence: CTG
tctctaaaaaagaaataaaa

SEQ ID NO: 13855 - DNA, 20 bp, Artificial Sequence
  Description of Artificial Sequence: Synthetic oligonucleotide
  Target: ANGPTL4; (-) strand; PAM type: YTN; PAM sequence: CTG
ggcaacagagtgagatcctg

SEQ ID NO: 13856 - DNA, 20 bp, Artificial Sequence
  Description of Artificial Sequence: Synthetic oligonucleotide
  Target: ANGPTL4; (-) strand; PAM type: YTN; PAM sequence: CTC
cagcctgggcaacagagtga

SEQ ID NO: 13857 - DNA, 20 bp, Artificial Sequence
  Description of Artificial Sequence: Synthetic oligonucleotide
  Target: ANGPTL4; (-) strand; PAM type: YTN; PAM sequence: CTG
cactccagcctgggcaacag

SEQ ID NO: 13858 - DNA, 20 bp, Artificial Sequence
  Description of Artificial Sequence: Synthetic oligonucleotide
  Target: ANGPTL4; (-) strand; PAM type: YTN; PAM sequence: CTG
cagtgagccacaatggtgcc

SEQ ID NO: 13859 - DNA, 20 bp, Artificial Sequence
  Description of Artificial Sequence: Synthetic oligonucleotide
  Target: ANGPTL4; (-) strand; PAM type: YTN; PAM sequence: TTG
agcccaggaggtagaggctg

SEQ ID NO: 13860 - DNA, 20 bp, Artificial Sequence
  Description of Artificial Sequence: Synthetic oligonucleotide
  Target: ANGPTL4; (-) strand; PAM type: YTN; PAM sequence: CTT
gagcccaggaggtagaggct

SEQ ID NO: 13861 - DNA, 20 bp, Artificial Sequence
  Description of Artificial Sequence: Synthetic oligonucleotide
  Target: ANGPTL4; (-) strand; PAM type: YTN; PAM sequence: CTC
acttgagcccaggaggtaga

SEQ ID NO: 13862 - DNA, 20 bp, Artificial Sequence
  Description of Artificial Sequence: Synthetic oligonucleotide
  Target: ANGPTL4; (-) strand; PAM type: YTN; PAM sequence: CTG
aggtgggaggctcacttgag

SEQ ID NO: 13863 - DNA, 20 bp, Artificial Sequence
  Description of Artificial Sequence: Synthetic oligonucleotide
  Target: ANGPTL4; (-) strand; PAM type: YTN; PAM sequence: TTG
ggagcctgaggtgggaggct

SEQ ID NO: 13864 - DNA, 20 bp, Artificial Sequence
  Description of Artificial Sequence: Synthetic oligonucleotide
  Target: ANGPTL4; (-) strand; PAM type: YTN; PAM sequence: CTT
gggagcctgaggtgggaggc

SEQ ID NO: 13865 - DNA, 20 bp, Artificial Sequence
  Description of Artificial Sequence: Synthetic oligonucleotide
  Target: ANGPTL4; (-) strand; PAM type: YTN; PAM sequence: CTA
cttgggagcctgaggtggga

SEQ ID NO: 13866 - DNA, 20 bp, Artificial Sequence
  Description of Artificial Sequence: Synthetic oligonucleotide
  Target: ANGPTL4; (-) strand; PAM type: YTN; PAM sequence: CTG
tggtcgcagctacttgggag

SEQ ID NO: 13867 - DNA, 20 bp, Artificial Sequence
  Description of Artificial Sequence: Synthetic oligonucleotide
  Target: ANGPTL4; (-) strand; PAM type: YTN; PAM sequence: TTA
gagaacagaaagaggagaca

SEQ ID NO: 13868 - DNA, 20 bp, Artificial Sequence
  Description of Artificial Sequence: Synthetic oligonucleotide
  Target: ANGPTL4; (-) strand; PAM type: YTN; PAM sequence: CTT
agagaacagaaagaggagac

SEQ ID NO: 13869 - DNA, 20 bp, Artificial Sequence
  Description of Artificial Sequence: Synthetic oligonucleotide
  Target: ANGPTL4; (-) strand; PAM type: YTN; PAM sequence: CTA
taataaagcaggaacttaga

SEQ ID NO: 13870 - DNA, 20 bp, Artificial Sequence
  Description of Artificial Sequence: Synthetic oligonucleotide
  Target: ANGPTL4; (-) strand; PAM type: YTN; PAM sequence: TTG
cctataataaagcaggaact

SEQ ID NO: 13871 - DNA, 20 bp, Artificial Sequence
  Description of Artificial Sequence: Synthetic oligonucleotide
  Target: ANGPTL4; (-) strand; PAM type: YTN; PAM sequence: TTT
gcctataataaagcaggaac

SEQ ID NO: 13872 - DNA, 20 bp, Artificial Sequence
  Description of Artificial Sequence: Synthetic oligonucleotide
  Target: ANGPTL4; (-) strand; PAM type: YTN; PAM sequence: CTT
tgcctataataaagcaggaa

SEQ ID NO: 13873 - DNA, 20 bp, Artificial Sequence
  Description of Artificial Sequence: Synthetic oligonucleotide
  Target: ANGPTL4; (-) strand; PAM type: YTN; PAM sequence: CTG
agctttgcctataataaagc

SEQ ID NO: 13874 - DNA, 20 bp, Artificial Sequence
  Description of Artificial Sequence: Synthetic oligonucleotide
  Target: ANGPTL4; (-) strand; PAM type: YTN; PAM sequence: TTA
atgtcctgagctttgcctat

SEQ ID NO: 13875 - DNA, 20 bp, Artificial Sequence
  Description of Artificial Sequence: Synthetic oligonucleotide
  Target: ANGPTL4; (-) strand; PAM type: YTN; PAM sequence: TTT
aatgtcctgagctttgccta

SEQ ID NO: 13876 - DNA, 20 bp, Artificial Sequence
  Description of Artificial Sequence: Synthetic oligonucleotide
  Target: ANGPTL4; (-) strand; PAM type: YTN; PAM sequence: CTT
taatgtcctgagctttgcct

SEQ ID NO: 13877 - DNA, 20 bp, Artificial Sequence
  Description of Artificial Sequence: Synthetic oligonucleotide
  Target: ANGPTL4; (-) strand; PAM type: YTN; PAM sequence: CTA
ccgccagggtctttaatgtc

SEQ ID NO: 13878 - DNA, 20 bp, Artificial Sequence
  Description of Artificial Sequence: Synthetic oligonucleotide
  Target: ANGPTL4; (-) strand; PAM type: YTN; PAM sequence: CTC
taccgccagggtctttaatg

SEQ ID NO: 13879 - DNA, 20 bp, Artificial Sequence
  Description of Artificial Sequence: Synthetic oligonucleotide
  Target: ANGPTL4; (-) strand; PAM type: YTN; PAM sequence: CTA
ccctctaccgccagggtctt

SEQ ID NO: 13880 - DNA, 20 bp, Artificial Sequence
  Description of Artificial Sequence: Synthetic oligonucleotide
  Target: ANGPTL4; (-) strand; PAM type: YTN; PAM sequence: CTC
acccccatagcctaccctct

SEQ ID NO: 13881 - DNA, 20 bp, Artificial Sequence
  Description of Artificial Sequence: Synthetic oligonucleotide
  Target: ANGPTL4; (-) strand; PAM type: YTN; PAM sequence: TTG
gatcagggcctcacccccat

SEQ ID NO: 13882 - DNA, 20 bp, Artificial Sequence
  Description of Artificial Sequence: Synthetic oligonucleotide
  Target: ANGPTL4; (-) strand; PAM type: YTN; PAM sequence: CTT
ggatcagggcctcaccccca

SEQ ID NO: 13883 - DNA, 20 bp, Artificial Sequence
  Description of Artificial Sequence: Synthetic oligonucleotide
  Target: ANGPTL4; (-) strand; PAM type: YTN; PAM sequence: TTA
gcggcaggacttggatcagg

SEQ ID NO: 13884 - DNA, 20 bp, Artificial Sequence
  Description of Artificial Sequence: Synthetic oligonucleotide
  Target: ANGPTL4; (-) strand; PAM type: YTN; PAM sequence: CTT
agcggcaggacttggatcag

SEQ ID NO: 13885 - DNA, 20 bp, Artificial Sequence
  Description of Artificial Sequence: Synthetic oligonucleotide
  Target: ANGPTL4; (-) strand; PAM type: YTN; PAM sequence: TTA
tgagtgccttagcggcagga

SEQ ID NO: 13886 - DNA, 20 bp, Artificial Sequence
  Description of Artificial Sequence: Synthetic oligonucleotide
  Target: ANGPTL4; (-) strand; PAM type: YTN; PAM sequence: CTG
agcccgaaattatgagtgcc

SEQ ID NO: 13887 - DNA, 20 bp, Artificial Sequence
  Description of Artificial Sequence: Synthetic oligonucleotide
  Target: ANGPTL4; (-) strand; PAM type: YTN; PAM sequence: CTC
ccctgagcccgaaattatga

SEQ ID NO: 13888 - DNA, 20 bp, Artificial Sequence
  Description of Artificial Sequence: Synthetic oligonucleotide
  Target: ANGPTL4; (-) strand; PAM type: YTN; PAM sequence: TTC
tcccctgagcccgaaattat

SEQ ID NO: 13889 - DNA, 20 bp, Artificial Sequence
  Description of Artificial Sequence: Synthetic oligonucleotide
  Target: ANGPTL4; (-) strand; PAM type: YTN; PAM sequence: TTT
ctcccctgagcccgaaatta

SEQ ID NO: 13890 - DNA, 20 bp, Artificial Sequence
  Description of Artificial Sequence: Synthetic oligonucleotide
  Target: ANGPTL4; (-) strand; PAM type: YTN; PAM sequence: TTC
catttctcccctgagcccga

SEQ ID NO: 13891 - DNA, 20 bp, Artificial Sequence
  Description of Artificial Sequence: Synthetic oligonucleotide
  Target: ANGPTL4; (-) strand; PAM type: YTN; PAM sequence: CTT
ccatttctcccctgagcccg

SEQ ID NO: 13892 - DNA, 20 bp, Artificial Sequence
  Description of Artificial Sequence: Synthetic oligonucleotide
  Target: ANGPTL4; (-) strand; PAM type: YTN; PAM sequence: TTG
acttccatttctcccctgag

SEQ ID NO: 13893 - DNA, 20 bp, Artificial Sequence
  Description of Artificial Sequence: Synthetic oligonucleotide
  Target: ANGPTL4; (-) strand; PAM type: YTN; PAM sequence: TTT
gacttccatttctcccctga

SEQ ID NO: 13894 - DNA, 20 bp, Artificial Sequence
  Description of Artificial Sequence: Synthetic oligonucleotide
  Target: ANGPTL4; (-) strand; PAM type: YTN; PAM sequence: CTT
tgacttccatttctcccctg

SEQ ID NO: 13895 - DNA, 20 bp, Artificial Sequence
  Description of Artificial Sequence: Synthetic oligonucleotide
  Target: ANGPTL4; (-) strand; PAM type: YTN; PAM sequence: TTC
tttgacttccatttctcccc

SEQ ID NO: 13896 - DNA, 20 bp, Artificial Sequence
  Description of Artificial Sequence: Synthetic oligonucleotide
  Target: ANGPTL4; (-) strand; PAM type: YTN; PAM sequence: TTA
tgagattctttgacttccat

SEQ ID NO: 13897 - DNA, 20 bp, Artificial Sequence
  Description of Artificial Sequence: Synthetic oligonucleotide
  Target: ANGPTL4; (-) strand; PAM type: YTN; PAM sequence: TTT
atgagattctttgacttcca

SEQ ID NO: 13898 - DNA, 20 bp, Artificial Sequence
  Description of Artificial Sequence: Synthetic oligonucleotide
  Target: ANGPTL4; (-) strand; PAM type: YTN; PAM sequence: CTG
tgtttatgagattctttgac

SEQ ID NO: 13899 - DNA, 20 bp, Artificial Sequence
  Description of Artificial Sequence: Synthetic oligonucleotide
  Target: ANGPTL4; (-) strand; PAM type: YTN; PAM sequence: TTC
gtcatcgcagctgtgtttat

SEQ ID NO: 13900 - DNA, 20 bp, Artificial Sequence
  Description of Artificial Sequence: Synthetic oligonucleotide
  Target: ANGPTL4; (-) strand; PAM type: YTN; PAM sequence: TTC
ccgtgaaagggttcgtcatc

SEQ ID NO: 13901 - DNA, 20 bp, Artificial Sequence
  Description of Artificial Sequence: Synthetic oligonucleotide
  Target: ANGPTL4; (-) strand; PAM type: YTN; PAM sequence: CTT
cccgtgaaagggttcgtcat

SEQ ID NO: 13902 - DNA, 20 bp, Artificial Sequence
  Description of Artificial Sequence: Synthetic oligonucleotide
  Target: ANGPTL4; (-) strand; PAM type: YTN; PAM sequence: TTC
cttcccgtgaaagggttcgt

SEQ ID NO: 13903 - DNA, 20 bp, Artificial Sequence
  Description of Artificial Sequence: Synthetic oligonucleotide
  Target: ANGPTL4; (-) strand; PAM type: YTN; PAM sequence: CTC
gcatgttccttcccgtgaaa

SEQ ID NO: 13904 - DNA, 20 bp, Artificial Sequence
  Description of Artificial Sequence: Synthetic oligonucleotide
  Target: ANGPTL4; (-) strand; PAM type: YTN; PAM sequence: CTG
ggctcgcatgttccttcccg

SEQ ID NO: 13905 - DNA, 20 bp, Artificial Sequence
  Description of Artificial Sequence: Synthetic oligonucleotide
  Target: ANGPTL4; (-) strand; PAM type: YTN; PAM sequence: TTC
tgggctcgcatgttccttcc

SEQ ID NO: 13906 - DNA, 20 bp, Artificial Sequence
  Description of Artificial Sequence: Synthetic oligonucleotide
  Target: ANGPTL4; (-) strand; PAM type: YTN; PAM sequence: TTT
ctgggctcgcatgttccttc

SEQ ID NO: 13907 - DNA, 20 bp, Artificial Sequence
  Description of Artificial Sequence: Synthetic oligonucleotide
  Target: ANGPTL4; (-) strand; PAM type: YTN; PAM sequence: TTT
tctgggctcgcatgttcctt

SEQ ID NO: 13908 - DNA, 20 bp, Artificial Sequence
  Description of Artificial Sequence: Synthetic oligonucleotide
  Target: ANGPTL4; (-) strand; PAM type: YTN; PAM sequence: CTT
ttctgggctcgcatgttcct

SEQ ID NO: 13909 - DNA, 20 bp, Artificial Sequence
  Description of Artificial Sequence: Synthetic oligonucleotide
  Target: ANGPTL4; (-) strand; PAM type: YTN; PAM sequence: CTC
catcccaagaccaggagaga

SEQ ID NO: 13910 - DNA, 20 bp, Artificial Sequence
  Description of Artificial Sequence: Synthetic oligonucleotide
  Target: ANGPTL4; (-) strand; PAM type: YTN; PAM sequence: TTC
gtgtgacctccatcccaaga

SEQ ID NO: 13911 - DNA, 20 bp, Artificial Sequence
  Description of Artificial Sequence: Synthetic oligonucleotide
  Target: ANGPTL4; (-) strand; PAM type: YTN; PAM sequence: CTT
cgtgtgacctccatcccaag

SEQ ID NO: 13912 - DNA, 20 bp, Artificial Sequence
  Description of Artificial Sequence: Synthetic oligonucleotide
  Target: ANGPTL4; (-) strand; PAM type: YTN; PAM sequence: TTG
cggaggcttcgtgtgacctc

SEQ ID NO: 13913 - DNA, 20 bp, Artificial Sequence
  Description of Artificial Sequence: Synthetic oligonucleotide
  Target: ANGPTL4; (-) strand; PAM type: YTN; PAM sequence: CTT
gcggaggcttcgtgtgacct

SEQ ID NO: 13914 - DNA, 20 bp, Artificial Sequence
  Description of Artificial Sequence: Synthetic oligonucleotide
  Target: ANGPTL4; (-) strand; PAM type: YTN; PAM sequence: TTG
ccttgcggaggcttcgtgtg

SEQ ID NO: 13915 - DNA, 20 bp, Artificial Sequence
  Description of Artificial Sequence: Synthetic oligonucleotide
  Target: ANGPTL4; (-) strand; PAM type: YTN; PAM sequence: CTT
gccttgcggaggcttcgtgt

SEQ ID NO: 13916 - DNA, 20 bp, Artificial Sequence
  Description of Artificial Sequence: Synthetic oligonucleotide
  Target: ANGPTL4; (-) strand; PAM type: YTN; PAM sequence: CTC
accaaaagtccttgccttgc

SEQ ID NO: 13917 - DNA, 20 bp, Artificial Sequence
  Description of Artificial Sequence: Synthetic oligonucleotide
  Target: ANGPTL4; (-) strand; PAM type: YTN; PAM sequence: TTC
agcggagcccggaactcacc

SEQ ID NO: 13918 - DNA, 20 bp, Artificial Sequence
  Description of Artificial Sequence: Synthetic oligonucleotide
  Target: ANGPTL4; (-) strand; PAM type: YTN; PAM sequence: CTG
agttcagcggagcccggaac

SEQ ID NO: 13919 - DNA, 20 bp, Artificial Sequence
  Description of Artificial Sequence: Synthetic oligonucleotide
  Target: ANGPTL4; (-) strand; PAM type: YTN; PAM sequence: CTC
aaaatgaaagaagagaaaag

SEQ ID NO: 13920 - DNA, 20 bp, Artificial Sequence
  Description of Artificial Sequence: Synthetic oligonucleotide
  Target: ANGPTL4; (-) strand; PAM type: YTN; PAM sequence: CTG
ggcgacagagccagagtacg

SEQ ID NO: 13921 - DNA, 20 bp, Artificial Sequence
  Description of Artificial Sequence: Synthetic oligonucleotide
  Target: ANGPTL4; (-) strand; PAM type: YTN; PAM sequence: CTC
cagcctgggcgacagagcca

SEQ ID NO: 13922 - DNA, 20 bp, Artificial Sequence
  Description of Artificial Sequence: Synthetic oligonucleotide
  Target: ANGPTL4; (-) strand; PAM type: YTN; PAM sequence: TTG
cgctccagcctgggcgacag

SEQ ID NO: 13923 - DNA, 20 bp, Artificial Sequence
  Description of Artificial Sequence: Synthetic oligonucleotide
  Target: ANGPTL4; (-) strand; PAM type: YTN; PAM sequence: TTG
cagtgcgccgagatggcgcc

SEQ ID NO: 13924 - DNA, 20 bp, Artificial Sequence
  Description of Artificial Sequence: Synthetic oligonucleotide
  Target: ANGPTL4; (-) strand; PAM type: YTN; PAM sequence: TTG
aacccgggaggtggaggttg

SEQ ID NO: 13925 - DNA, 20 bp, Artificial Sequence
  Description of Artificial Sequence: Synthetic oligonucleotide
  Target: ANGPTL4; (-) strand; PAM type: YTN; PAM sequence: CTT
gaacccgggaggtggaggtt

SEQ ID NO: 13926 - DNA, 20 bp, Artificial Sequence
  Description of Artificial Sequence: Synthetic oligonucleotide
  Target: ANGPTL4; (-) strand; PAM type: YTN; PAM sequence: CTG
aggcagtagaatcgcttgaa

SEQ ID NO: 13927 - DNA, 20 bp, Artificial Sequence
  Description of Artificial Sequence: Synthetic oligonucleotide
  Target: ANGPTL4; (-) strand; PAM type: YTN; PAM sequence: CTC
gggaggctgaggcagtagaa

SEQ ID NO: 13928 - DNA, 20 bp, Artificial Sequence
  Description of Artificial Sequence: Synthetic oligonucleotide
  Target: ANGPTL4; (-) strand; PAM type: YTN; PAM sequence: CTA
ctcgggaggctgaggcagta

SEQ ID NO: 13929 - DNA, 20 bp, Artificial Sequence
  Description of Artificial Sequence: Synthetic oligonucleotide
  Target: ANGPTL4; (-) strand; PAM type: YTN; PAM sequence: CTG
tagtcccagctactcgggag

SEQ ID NO: 13930 - DNA, 20 bp, Artificial Sequence
  Description of Artificial Sequence: Synthetic oligonucleotide
  Target: ANGPTL4; (-) strand; PAM type: YTN; PAM sequence: TTG
gtagtgcgcgcctgtagtcc

SEQ ID NO: 13931 - DNA, 20 bp, Artificial Sequence
  Description of Artificial Sequence: Synthetic oligonucleotide
  Target: ANGPTL4; (-) strand; PAM type: YTN; PAM sequence: CTT
ggtagtgcgcgcctgtagtc

SEQ ID NO: 13932 - DNA, 20 bp, Artificial Sequence
  Description of Artificial Sequence: Synthetic oligonucleotide
  Target: ANGPTL4; (-) strand; PAM type: YTN; PAM sequence: TTA
gccgggcttggtagtgcgcg

SEQ ID NO: 13933 - DNA, 20 bp, Artificial Sequence
  Description of Artificial Sequence: Synthetic oligonucleotide
  Target: ANGPTL4; (-) strand; PAM type: YTN; PAM sequence: CTA
aaaatacaaaaaaaaattag

SEQ ID NO: 13934 - DNA, 20 bp, Artificial Sequence
  Description of Artificial Sequence: Synthetic oligonucleotide
  Target: ANGPTL4; (-) strand; PAM type: YTN; PAM sequence: CTA
ctaaaaatacaaaaaaaaat

SEQ ID NO: 13935 - DNA, 20 bp, Artificial Sequence
  Description of Artificial Sequence: Synthetic oligonucleotide
  Target: ANGPTL4; (-) strand; PAM type: YTN; PAM sequence: CTC
tactaaaaatacaaaaaaaa

SEQ ID NO: 13936 - DNA, 20 bp, Artificial Sequence
  Description of Artificial Sequence: Synthetic oligonucleotide
  Target: ANGPTL4; (-) strand; PAM type: YTN; PAM sequence: TTC
cagaccagcccggccaacat

SEQ ID NO: 13937 - DNA, 20 bp, Artificial Sequence
  Description of Artificial Sequence: Synthetic oligonucleotide
  Target: ANGPTL4; (-) strand; PAM type: YTN; PAM sequence: CTT
ccagaccagcccggccaaca

SEQ ID NO: 13938 - DNA, 20 bp, Artificial Sequence
  Description of Artificial Sequence: Synthetic oligonucleotide
  Target: ANGPTL4; (-) strand; PAM type: YTN; PAM sequence: TTG
aggtcaagacttccagacca

SEQ ID NO: 13939 - DNA, 20 bp, Artificial Sequence
  Description of Artificial Sequence: Synthetic oligonucleotide
  Target: ANGPTL4; (-) strand; PAM type: YTN; PAM sequence: CTT
gaggtcaagacttccagacc

SEQ ID NO: 13940 - DNA, 20 bp, Artificial Sequence
  Description of Artificial Sequence: Synthetic oligonucleotide
  Target: ANGPTL4; (-) strand; PAM type: YTN; PAM sequence: TTA
cccagtggcggagagggcgc

SEQ ID NO: 13941 - DNA, 20 bp, Artificial Sequence
  Description of Artificial Sequence: Synthetic oligonucleotide
  Target: ANGPTL4; (-) strand; PAM type: YTN; PAM sequence: CTT
acccagtggcggagagggcg

SEQ ID NO: 13942 - DNA, 20 bp, Artificial Sequence
  Description of Artificial Sequence: Synthetic oligonucleotide
  Target: ANGPTL4; (-) strand; PAM type: YTN; PAM sequence: TTC
cgcccccgccttacccagtg

SEQ ID NO: 13943 - DNA, 20 bp, Artificial Sequence
  Description of Artificial Sequence: Synthetic oligonucleotide
  Target: ANGPTL4; (-) strand; PAM type: YTN; PAM sequence: CTA
ttccgcccccgccttaccca

SEQ ID NO: 13944 - DNA, 20 bp, Artificial Sequence
  Description of Artificial Sequence: Synthetic oligonucleotide
  Target: ANGPTL4; (-) strand; PAM type: YTN; PAM sequence: TTG
caagccccctattccgcccc

SEQ ID NO: 13945 - DNA, 20 bp, Artificial Sequence
  Description of Artificial Sequence: Synthetic oligonucleotide
  Target: ANGPTL4; (-) strand; PAM type: YTN; PAM sequence: CTA
gtgtgaaattgcaagccccc

SEQ ID NO: 13946 - DNA, 20 bp, Artificial Sequence
  Description of Artificial Sequence: Synthetic oligonucleotide
  Target: ANGPTL4; (-) strand; PAM type: YTN; PAM sequence: CTC
tagtgtgaaattgcaagccc

SEQ ID NO: 13947 - DNA, 20 bp, Artificial Sequence
  Description of Artificial Sequence: Synthetic oligonucleotide
  Target: ANGPTL4; (-) strand; PAM type: YTN; PAM sequence: TTC
ccccacggtgcccgcctcta

SEQ ID NO: 13948 - DNA, 20 bp, Artificial Sequence
  Description of Artificial Sequence: Synthetic oligonucleotide
  Target: ANGPTL4; (-) strand; PAM type: YTN; PAM sequence: TTT
cccccacggtgcccgcctct

SEQ ID NO: 13949 - DNA, 20 bp, Artificial Sequence
  Description of Artificial Sequence: Synthetic oligonucleotide
  Target: ANGPTL4; (-) strand; PAM type: YTN; PAM sequence: CTT
tcccccacggtgcccgcctc

SEQ ID NO: 13950 - DNA, 20 bp, Artificial Sequence
  Description of Artificial Sequence: Synthetic oligonucleotide
  Target: ANGPTL4; (-) strand; PAM type: YTN; PAM sequence: TTC
tttcccccacggtgcccgcc

SEQ ID NO: 13951 - DNA, 20 bp, Artificial Sequence
  Description of Artificial Sequence: Synthetic oligonucleotide
  Target: ANGPTL4; (-) strand; PAM type: YTN; PAM sequence: CTT
ctttcccccacggtgcccgc

SEQ ID NO: 13952 - DNA, 20 bp, Artificial Sequence
  Description of Artificial Sequence: Synthetic oligonucleotide
  Target: ANGPTL4; (-) strand; PAM type: YTN; PAM sequence: CTC
ttctttcccccacggtgccc

SEQ ID NO: 13953 - DNA, 20 bp, Artificial Sequence
  Description of Artificial Sequence: Synthetic oligonucleotide
  Target: ANGPTL4; (-) strand; PAM type: YTN; PAM sequence: CTA
cgaaccgtgggagacgtgac

SEQ ID NO: 13954 - DNA, 20 bp, Artificial Sequence
  Description of Artificial Sequence: Synthetic oligonucleotide
  Target: ANGPTL4; (-) strand; PAM type: YTN; PAM sequence: CTC
tacgaaccgtgggagacgtg

SEQ ID NO: 13955 - DNA, 20 bp, Artificial Sequence
  Description of Artificial Sequence: Synthetic oligonucleotide
  Target: ANGPTL4; (-) strand; PAM type: YTN; PAM sequence: TTC
ctctacgaaccgtgggagac

SEQ ID NO: 13956 - DNA, 20 bp, Artificial Sequence
  Description of Artificial Sequence: Synthetic oligonucleotide
  Target: ANGPTL4; (-) strand; PAM type: YTN; PAM sequence: CTT
cctctacgaaccgtgggaga

SEQ ID NO: 13957 - DNA, 20 bp, Artificial Sequence
  Description of Artificial Sequence: Synthetic oligonucleotide
  Target: ANGPTL4; (-) strand; PAM type: YTN; PAM sequence: CTC
aggcaggccttcctctacga

SEQ ID NO: 13958 - DNA, 20 bp, Artificial Sequence
  Description of Artificial Sequence: Synthetic oligonucleotide
  Target: ANGPTL4; (-) strand; PAM type: YTN; PAM sequence: CTC
caggctcaggcaggccttcc

SEQ ID NO: 13959 - DNA, 20 bp, Artificial Sequence
  Description of Artificial Sequence: Synthetic oligonucleotide
  Target: ANGPTL4; (-) strand; PAM type: YTN; PAM sequence: CTC
ccgcccccgctccaggctca

SEQ ID NO: 13960 - DNA, 20 bp, Artificial Sequence
  Description of Artificial Sequence: Synthetic oligonucleotide
  Target: ANGPTL4; (-) strand; PAM type: YTN; PAM sequence: CTC
tcccgcccccgctccaggct

SEQ ID NO: 13961 - DNA, 20 bp, Artificial Sequence
  Description of Artificial Sequence: Synthetic oligonucleotide
  Target: ANGPTL4; (-) strand; PAM type: YTN; PAM sequence: CTG
tggctctcccgcccccgctc

SEQ ID NO: 13962 - DNA, 20 bp, Artificial Sequence
  Description of Artificial Sequence: Synthetic oligonucleotide
  Target: ANGPTL4; (-) strand; PAM type: YTN; PAM sequence: CTG
gggatgccaaactgtggctc

SEQ ID NO: 13963 - DNA, 20 bp, Artificial Sequence
  Description of Artificial Sequence: Synthetic oligonucleotide
  Target: ANGPTL4; (-) strand; PAM type: YTN; PAM sequence: CTG
ggggatgccctggggatgcc

SEQ ID NO: 13964 - DNA, 20 bp, Artificial Sequence
  Description of Artificial Sequence: Synthetic oligonucleotide
  Target: ANGPTL4; (-) strand; PAM type: YTN; PAM sequence: CTG
cgggctgggggatgccctgg

SEQ ID NO: 13965 - DNA, 20 bp, Artificial Sequence
  Description of Artificial Sequence: Synthetic oligonucleotide
  Target: ANGPTL4; (-) strand; PAM type: YTN; PAM sequence: CTG
gtagtctgcgggctggggga

SEQ ID NO: 13966 - DNA, 20 bp, Artificial Sequence
  Description of Artificial Sequence: Synthetic oligonucleotide
  Target: ANGPTL4; (-) strand; PAM type: YTN; PAM sequence: CTG
gaggcctggtagtctgcggg

SEQ ID NO: 13967 - DNA, 20 bp, Artificial Sequence
  Description of Artificial Sequence: Synthetic oligonucleotide
  Target: ANGPTL4; (-) strand; PAM type: YTN; PAM sequence: CTC
tggaggcctggtagtctgcg

SEQ ID NO: 13968 - DNA, 20 bp, Artificial Sequence
  Description of Artificial Sequence: Synthetic oligonucleotide
  Target: ANGPTL4; (-) strand; PAM type: YTN; PAM sequence: CTG
tcctctggaggcctggtagt

SEQ ID NO: 13969 - DNA, 20 bp, Artificial Sequence
  Description of Artificial Sequence: Synthetic oligonucleotide
  Target: ANGPTL4; (-) strand; PAM type: YTN; PAM sequence: CTG
tggccgggggtggggtcctg

SEQ ID NO: 13970 - DNA, 20 bp, Artificial Sequence
  Description of Artificial Sequence: Synthetic oligonucleotide
  Target: ANGPTL4; (-) strand; PAM type: YTN; PAM sequence: CTG
ggggcagggcctgtggccgg

SEQ ID NO: 13971 - DNA, 20 bp, Artificial Sequence
  Description of Artificial Sequence: Synthetic oligonucleotide
  Target: ANGPTL4; (-) strand; PAM type: YTN; PAM sequence: TTG
gaggcggggtgcggggagtg

SEQ ID NO: 13972 - DNA, 20 bp, Artificial Sequence
  Description of Artificial Sequence: Synthetic oligonucleotide
  Target: ANGPTL4; (-) strand; PAM type: YTN; PAM sequence: CTT
ggaggcggggtgcggggagt

SEQ ID NO: 13973 - DNA, 20 bp, Artificial Sequence
  Description of Artificial Sequence: Synthetic oligonucleotide
  Target: ANGPTL4; (-) strand; PAM type: YTN; PAM sequence: TTG
ggtgcggagtgggcggagga

SEQ ID NO: 13974 - DNA, 20 bp, Artificial Sequence
  Description of Artificial Sequence: Synthetic oligonucleotide
  Target: ANGPTL4; (-) strand; PAM type: YTN; PAM sequence: TTA
taagttgggtgcggagtggg

SEQ ID NO: 13975 - DNA, 20 bp, Artificial Sequence
  Description of Artificial Sequence: Synthetic oligonucleotide
  Target: ANGPTL4; (-) strand; PAM type: YTN; PAM sequence: TTT
ataagttgggtgcggagtgg

SEQ ID NO: 13976 - DNA, 20 bp, Artificial Sequence
  Description of Artificial Sequence: Synthetic oligonucleotide
  Target: ANGPTL4; (-) strand; PAM type: YTN; PAM sequence: TTT
tataagttgggtgcggagtg

SEQ ID NO: 13977 - DNA, 20 bp, Artificial Sequence
  Description of Artificial Sequence: Synthetic oligonucleotide
  Target: ANGPTL4; (-) strand; PAM type: YTN; PAM sequence: TTT
ttataagttgggtgcggagt

SEQ ID NO: 13978 - DNA, 20 bp, Artificial Sequence
  Description of Artificial Sequence: Synthetic oligonucleotide
  Target: ANGPTL4; (-) strand; PAM type: YTN; PAM sequence: CTC
cccgccgcgcccgaggacgg

SEQ ID NO: 13979 - DNA, 20 bp, Artificial Sequence
  Description of Artificial Sequence: Synthetic oligonucleotide
  Target: ANGPTL4; (-) strand; PAM type: YTN; PAM sequence: TTC
tccccgccgcgcccgaggac

SEQ ID NO: 13980 - DNA, 20 bp, Artificial Sequence
  Description of Artificial Sequence: Synthetic oligonucleotide
  Target: ANGPTL4; (-) strand; PAM type: YTN; PAM sequence: CTT
ctccccgccgcgcccgagga

SEQ ID NO: 13981 - DNA, 20 bp, Artificial Sequence
  Description of Artificial Sequence: Synthetic oligonucleotide
  Target: ANGPTL4; (-) strand; PAM type: YTN; PAM sequence: CTC
ggcttctccccgccgcgccc

SEQ ID NO: 13982 - DNA, 20 bp, Artificial Sequence
  Description of Artificial Sequence: Synthetic oligonucleotide
  Target: ANGPTL4; (-) strand; PAM type: YTN; PAM sequence: CTC
agctcggcttctccccgccg

SEQ ID NO: 13983 - DNA, 20 bp, Artificial Sequence
  Description of Artificial Sequence: Synthetic oligonucleotide
  Target: ANGPTL4; (-) strand; PAM type: YTN; PAM sequence: CTG
gaaagaatcggatcacagtc

SEQ ID NO: 13984 - DNA, 20 bp, Artificial Sequence
  Description of Artificial Sequence: Synthetic oligonucleotide
  Target: ANGPTL4; (-) strand; PAM type: YTN; PAM sequence: TTG
cagaagccgctggaaagaat

SEQ ID NO: 13985 - DNA, 20 bp, Artificial Sequence
  Description of Artificial Sequence: Synthetic oligonucleotide
  Target: ANGPTL4; (-) strand; PAM type: YTN; PAM sequence: TTG
gttgcagaagccgctggaaa

SEQ ID NO: 13986 - DNA, 20 bp, Artificial Sequence
  Description of Artificial Sequence: Synthetic oligonucleotide
  Target: ANGPTL4; (-) strand; PAM type: YTN; PAM sequence: CTT
ggttgcagaagccgctggaa

SEQ ID NO: 13987 - DNA, 20 bp, Artificial Sequence
  Description of Artificial Sequence: Synthetic oligonucleotide
  Target: ANGPTL4; (-) strand; PAM type: YTN; PAM sequence: CTG
gagacgcggaggaccggggg

SEQ ID NO: 13988 - DNA, 20 bp, Artificial Sequence
  Description of Artificial Sequence: Synthetic oligonucleotide
  Target: ANGPTL4; (-) strand; PAM type: YTN; PAM sequence: TTC
caggtgcgaggactggagac

SEQ ID NO: 13989 - DNA, 20 bp, Artificial Sequence
  Description of Artificial Sequence: Synthetic oligonucleotide
  Target: ANGPTL4; (-) strand; PAM type: YTN; PAM sequence: TTG
gggttccaggtgcgaggact

SEQ ID NO: 13990 - DNA, 20 bp, Artificial Sequence
  Description of Artificial Sequence: Synthetic oligonucleotide
  Target: ANGPTL4; (-) strand; PAM type: YTN; PAM sequence: CTC
ggggacgttggggttccagg

SEQ ID NO: 13991 - DNA, 20 bp, Artificial Sequence
  Description of Artificial Sequence: Synthetic oligonucleotide
  Target: ANGPTL4; (-) strand; PAM type: YTN; PAM sequence: CTC
tcggggacgttggggttcca

SEQ ID NO: 13992 - DNA, 20 bp, Artificial Sequence
  Description of Artificial Sequence: Synthetic oligonucleotide
  Target: ANGPTL4; (-) strand; PAM type: YTN; PAM sequence: TTC
ggggactctcggggacgttg

SEQ ID NO: 13993 - DNA, 20 bp, Artificial Sequence
  Description of Artificial Sequence: Synthetic oligonucleotide
  Target: ANGPTL4; (-) strand; PAM type: YTN; PAM sequence: CTG
ggagcggggattcggggact

SEQ ID NO: 13994 - DNA, 20 bp, Artificial Sequence
  Description of Artificial Sequence: Synthetic oligonucleotide
  Target: ANGPTL4; (-) strand; PAM type: YTN; PAM sequence: TTA
ggtagcctgggagcggggat

SEQ ID NO: 13995 - DNA, 20 bp, Artificial Sequence
  Description of Artificial Sequence: Synthetic oligonucleotide
  Target: ANGPTL4; (-) strand; PAM type: YTN; PAM sequence: CTT
aggtagcctgggagcgggga

SEQ ID NO: 13996 - DNA, 20 bp, Artificial Sequence
  Description of Artificial Sequence: Synthetic oligonucleotide
  Target: ANGPTL4; (-) strand; PAM type: YTN; PAM sequence: CTC
ttaggtagcctgggagcggg

SEQ ID NO: 13997 - DNA, 20 bp, Artificial Sequence
  Description of Artificial Sequence: Synthetic oligonucleotide
  Target: ANGPTL4; (-) strand; PAM type: YTN; PAM sequence: CTC
atcctcttaggtagcctggg

SEQ ID NO: 13998 - DNA, 20 bp, Artificial Sequence
  Description of Artificial Sequence: Synthetic oligonucleotide
  Target: ANGPTL4; (-) strand; PAM type: YTN; PAM sequence: CTG
ccccggccgtcggagcaccg

SEQ ID NO: 13999 - DNA, 20 bp, Artificial Sequence
  Description of Artificial Sequence: Synthetic oligonucleotide
  Target: ANGPTL4; (-) strand; PAM type: YTN; PAM sequence: CTC
agtagcacggcggtggcggc

SEQ ID NO: 14000 - DNA, 20 bp, Artificial Sequence
  Description of Artificial Sequence: Synthetic oligonucleotide
  Target: ANGPTL4; (-) strand; PAM type: YTN; PAM sequence: CTG
agcgctcagtagcacggcgg

SEQ ID NO: 14001 - DNA, 20 bp, Artificial Sequence
  Description of Artificial Sequence: Synthetic oligonucleotide
  Target: ANGPTL4; (-) strand; PAM type: YTN; PAM sequence: CTG
cacgggtccgccctgagcgc

SEQ ID NO: 14002 - DNA, 20 bp, Artificial Sequence
  Description of Artificial Sequence: Synthetic oligonucleotide
  Target: ANGPTL4; (-) strand; PAM type: YTN; PAM sequence: TTG
gactgcacgggtccgccctg

SEQ ID NO: 14003 - DNA, 20 bp, Artificial Sequence
  Description of Artificial Sequence: Synthetic oligonucleotide
  Target: ANGPTL4; (-) strand; PAM type: YTN; PAM sequence: CTT
ggactgcacgggtccgccct

SEQ ID NO: 14004 - DNA, 20 bp, Artificial Sequence
  Description of Artificial Sequence: Synthetic oligonucleotide
  Target: ANGPTL4; (-) strand; PAM type: YTN; PAM sequence: CTC
gtcccaggacgcaaagcgcg

SEQ ID NO: 14005 - DNA, 20 bp, Artificial Sequence
  Description of Artificial Sequence: Synthetic oligonucleotide
  Target: ANGPTL4; (-) strand; PAM type: YTN; PAM sequence: TTC
atctcgtcccaggacgcaaa

SEQ ID NO: 14006 - DNA, 20 bp, Artificial Sequence
  Description of Artificial Sequence: Synthetic oligonucleotide
  Target: ANGPTL4; (-) strand; PAM type: YTN; PAM sequence: CTG
caggagtccgtgcgccagga

SEQ ID NO: 14007 - DNA, 20 bp, Artificial Sequence
  Description of Artificial Sequence: Synthetic oligonucleotide
  Target: ANGPTL4; (-) strand; PAM type: YTN; PAM sequence: CTG
gccgagctgcaggagtccgt

SEQ ID NO: 14008 - DNA, 20 bp, Artificial Sequence
  Description of Artificial Sequence: Synthetic oligonucleotide
  Target: ANGPTL4; (-) strand; PAM type: YTN; PAM sequence: TTC
gcgcagcccctggccgagct

SEQ ID NO: 14009 - DNA, 20 bp, Artificial Sequence
  Description of Artificial Sequence: Synthetic oligonucleotide
  Target: ANGPTL4; (-) strand; PAM type: YTN; PAM sequence: CTC
cgcgtgttcgcgcagcccct

SEQ ID NO: 14010 - DNA, 20 bp, Artificial Sequence
  Description of Artificial Sequence: Synthetic oligonucleotide
  Target: ANGPTL4; (-) strand; PAM type: YTN; PAM sequence: CTG
cgggtgcgctccgcgtgttc

SEQ ID NO: 14011 - DNA, 20 bp, Artificial Sequence
  Description of Artificial Sequence: Synthetic oligonucleotide
  Target: ANGPTL4; (-) strand; PAM type: YTN; PAM sequence: CTG
actgcgggtgcgctccgcgt

SEQ ID NO: 14012 - DNA, 20 bp, Artificial Sequence
  Description of Artificial Sequence: Synthetic oligonucleotide
  Target: ANGPTL4; (-) strand; PAM type: YTN; PAM sequence: CTC
agctgactgcgggtgcgctc

SEQ ID NO: 14013 - DNA, 20 bp, Artificial Sequence
  Description of Artificial Sequence: Synthetic oligonucleotide
  Target: ANGPTL4; (-) strand; PAM type: YTN; PAM sequence: CTC
cagcgcgctcagctgactgc

SEQ ID NO: 14014 - DNA, 20 bp, Artificial Sequence
  Description of Artificial Sequence: Synthetic oligonucleotide
  Target: ANGPTL4; (-) strand; PAM type: YTN; PAM sequence: CTC
aggcgccgctccagcgcgct

SEQ ID NO: 14015 - DNA, 20 bp, Artificial Sequence
  Description of Artificial Sequence: Synthetic oligonucleotide
  Target: ANGPTL4; (-) strand; PAM type: YTN; PAM sequence: CTG
acaggcggacccgcacgcgc

SEQ ID NO: 14016 - DNA, 20 bp, Artificial Sequence
  Description of Artificial Sequence: Synthetic oligonucleotide
  Target: ANGPTL4; (-) strand; PAM type: YTN; PAM sequence: TTC
cctgacaggcggacccgcac

SEQ ID NO: 14017 - DNA, 20 bp, Artificial Sequence
  Description of Artificial Sequence: Synthetic oligonucleotide
  Target: ANGPTL4; (-) strand; PAM type: YTN; PAM sequence: CTC
ggttccctgacaggcggacc

SEQ ID NO: 14018 - DNA, 20 bp, Artificial Sequence
  Description of Artificial Sequence: Synthetic oligonucleotide
  Target: ANGPTL4; (-) strand; PAM type: YTN; PAM sequence: CTA
acgggaggtcggtggacccc

SEQ ID NO: 14019 - DNA, 20 bp, Artificial Sequence
  Description of Artificial Sequence: Synthetic oligonucleotide
  Target: ANGPTL4; (-) strand; PAM type: YTN; PAM sequence: CTC
aggggctaacgggaggtcgg

SEQ ID NO: 14020 - DNA, 20 bp, Artificial Sequence
  Description of Artificial Sequence: Synthetic oligonucleotide
  Target: ANGPTL4; (-) strand; PAM type: YTN; PAM sequence: CTC
tcaggggctaacgggaggtc

SEQ ID NO: 14021 - DNA, 20 bp, Artificial Sequence
  Description of Artificial Sequence: Synthetic oligonucleotide
  Target: ANGPTL4; (-) strand; PAM type: YTN; PAM sequence: CTC
agggtccacccggctctcag

SEQ ID NO: 14022 - DNA, 20 bp, Artificial Sequence
  Description of Artificial Sequence: Synthetic oligonucleotide
  Target: ANGPTL4; (-) strand; PAM type: YTN; PAM sequence: CTG
tgaaggacctcagggtccac

SEQ ID NO: 14023 - DNA, 20 bp, Artificial Sequence
  Description of Artificial Sequence: Synthetic oligonucleotide
  Target: ANGPTL4; (-) strand; PAM type: YTN; PAM sequence: CTG
caggctgtgaaggacctcag

SEQ ID NO: 14024 - DNA, 20 bp, Artificial Sequence
  Description of Artificial Sequence: Synthetic oligonucleotide
  Target: ANGPTL4; (-) strand; PAM type: YTN; PAM sequence: CTG
gggacacgtacctgcaggct

SEQ ID NO: 14025 - DNA, 20 bp, Artificial Sequence
  Description of Artificial Sequence: Synthetic oligonucleotide
  Target: ANGPTL4; (-) strand; PAM type: YTN; PAM sequence: CTA
ggggcgcggagaaccagccc

SEQ ID NO: 14026 - DNA, 20 bp, Artificial Sequence
  Description of Artificial Sequence: Synthetic oligonucleotide
  Target: ANGPTL4; (-) strand; PAM type: YTN; PAM sequence: TTC
caagccaggagagccactag

SEQ ID NO: 14027 - DNA, 20 bp, Artificial Sequence
  Description of Artificial Sequence: Synthetic oligonucleotide
  Target: ANGPTL4; (-) strand; PAM type: YTN; PAM sequence: CTT
ccaagccaggagagccacta

SEQ ID NO: 14028 - DNA, 20 bp, Artificial Sequence
  Description of Artificial Sequence: Synthetic oligonucleotide
  Target: ANGPTL4; (-) strand; PAM type: YTN; PAM sequence: CTG
tccatacccttccaagccag

SEQ ID NO: 14029 - DNA, 20 bp, Artificial Sequence
  Description of Artificial Sequence: Synthetic oligonucleotide
  Target: ANGPTL4; (-) strand; PAM type: YTN; PAM sequence: CTC
ctgtccatacccttccaagc

SEQ ID NO: 14030 - DNA, 20 bp, Artificial Sequence
  Description of Artificial Sequence: Synthetic oligonucleotide
  Target: ANGPTL4; (-) strand; PAM type: YTN; PAM sequence: TTG
cgcaccccgcccccacgccc

SEQ ID NO: 14031 - DNA, 20 bp, Artificial Sequence
  Description of Artificial Sequence: Synthetic oligonucleotide
  Target: ANGPTL4; (-) strand; PAM type: YTN; PAM sequence: TTG
acgcagggaagcccagggag

SEQ ID NO: 14032 - DNA, 20 bp, Artificial Sequence
  Description of Artificial Sequence: Synthetic oligonucleotide
  Target: ANGPTL4; (-) strand; PAM type: YTN; PAM sequence: CTT
gacgcagggaagcccaggga

SEQ ID NO: 14033 - DNA, 20 bp, Artificial Sequence
  Description of Artificial Sequence: Synthetic oligonucleotide
  Target: ANGPTL4; (-) strand; PAM type: YTN; PAM sequence: CTA
aggggggagcccatcccttg

SEQ ID NO: 14034 - DNA, 20 bp, Artificial Sequence
  Description of Artificial Sequence: Synthetic oligonucleotide
  Target: ANGPTL4; (-) strand; PAM type: YTN; PAM sequence: TTC
ctaaggggggagcccatccc

SEQ ID NO: 14035 - DNA, 20 bp, Artificial Sequence
  Description of Artificial Sequence: Synthetic oligonucleotide
  Target: ANGPTL4; (-) strand; PAM type: YTN; PAM sequence: CTT
cctaaggggggagcccatcc

SEQ ID NO: 14036 - DNA, 20 bp, Artificial Sequence
  Description of Artificial Sequence: Synthetic oligonucleotide
  Target: ANGPTL4; (-) strand; PAM type: YTN; PAM sequence: CTC
ggcttcctaaggggggagcc

SEQ ID NO: 14037 - DNA, 20 bp, Artificial Sequence
  Description of Artificial Sequence: Synthetic oligonucleotide
  Target: ANGPTL4; (-) strand; PAM type: YTN; PAM sequence: CTC
ctcggcttcctaagggggga

SEQ ID NO: 14038 - DNA, 20 bp, Artificial Sequence
  Description of Artificial Sequence: Synthetic oligonucleotide
  Target: ANGPTL4; (-) strand; PAM type: YTN; PAM sequence: CTC
cctcctcggcttcctaaggg

SEQ ID NO: 14039 - DNA, 20 bp, Artificial Sequence
  Description of Artificial Sequence: Synthetic oligonucleotide
  Target: ANGPTL4; (-) strand; PAM type: YTN; PAM sequence: TTG
agcgaacctccctcctcggc

SEQ ID NO: 14040 - DNA, 20 bp, Artificial Sequence
  Description of Artificial Sequence: Synthetic oligonucleotide
  Target: ANGPTL4; (-) strand; PAM type: YTN; PAM sequence: CTT
gagcgaacctccctcctcgg

SEQ ID NO: 14041 - DNA, 20 bp, Artificial Sequence
  Description of Artificial Sequence: Synthetic oligonucleotide
  Target: ANGPTL4; (-) strand; PAM type: YTN; PAM sequence: CTG
gccttgagcgaacctccctc

SEQ ID NO: 14042 - DNA, 20 bp, Artificial Sequence
  Description of Artificial Sequence: Synthetic oligonucleotide
  Target: ANGPTL4; (-) strand; PAM type: YTN; PAM sequence: TTC
ctggccttgagcgaacctcc

SEQ ID NO: 14043 - DNA, 20 bp, Artificial Sequence
  Description of Artificial Sequence: Synthetic oligonucleotide
  Target: ANGPTL4; (-) strand; PAM type: YTN; PAM sequence: TTG
aattcctggccttgagcgaa

SEQ ID NO: 14044 - DNA, 20 bp, Artificial Sequence
  Description of Artificial Sequence: Synthetic oligonucleotide
  Target: ANGPTL4; (-) strand; PAM type: YTN; PAM sequence: CTT
gaattcctggccttgagcga

SEQ ID NO: 14045 - DNA, 20 bp, Artificial Sequence
  Description of Artificial Sequence: Synthetic oligonucleotide
  Target: ANGPTL4; (-) strand; PAM type: YTN; PAM sequence: TTA
ggtggtcttgaattcctggc

SEQ ID NO: 14046 - DNA, 20 bp, Artificial Sequence
  Description of Artificial Sequence: Synthetic oligonucleotide
  Target: ANGPTL4; (-) strand; PAM type: YTN; PAM sequence: TTT
aggtggtcttgaattcctgg

SEQ ID NO: 14047 - DNA, 20 bp, Artificial Sequence
  Description of Artificial Sequence: Synthetic oligonucleotide
  Target: ANGPTL4; (-) strand; PAM type: YTN; PAM sequence: CTT
taggtggtcttgaattcctg

SEQ ID NO: 14048 - DNA, 20 bp, Artificial Sequence
  Description of Artificial Sequence: Synthetic oligonucleotide
  Target: ANGPTL4; (-) strand; PAM type: YTN; PAM sequence: TTG
ctttaggtggtcttgaattc

SEQ ID NO: 14049 - DNA, 20 bp, Artificial Sequence
  Description of Artificial Sequence: Synthetic oligonucleotide
  Target: ANGPTL4; (-) strand; PAM type: YTN; PAM sequence: TTT
gctttaggtggtcttgaatt

SEQ ID NO: 14050 - DNA, 20 bp, Artificial Sequence
  Description of Artificial Sequence: Synthetic oligonucleotide
  Target: ANGPTL4; (-) strand; PAM type: YTN; PAM sequence: TTT
tgctttaggtggtcttgaat

SEQ ID NO: 14051 - DNA, 20 bp, Artificial Sequence
  Description of Artificial Sequence: Synthetic oligonucleotide
  Target: ANGPTL4; (-) strand; PAM type: YTN; PAM sequence: CTA
ttttgctttaggtggtcttg

SEQ ID NO: 14052 - DNA, 20 bp, Artificial Sequence
  Description of Artificial Sequence: Synthetic oligonucleotide
  Target: ANGPTL4; (-) strand; PAM type: YTN; PAM sequence: CTC
gctattttgctttaggtggt

SEQ ID NO: 14053 - DNA, 20 bp, Artificial Sequence
  Description of Artificial Sequence: Synthetic oligonucleotide
  Target: ANGPTL4; (-) strand; PAM type: YTN; PAM sequence: TTG
tgtgtgtgtgtgtgtgtgtg

SEQ ID NO: 14054 - DNA, 20 bp, Artificial Sequence
  Description of Artificial Sequence: Synthetic oligonucleotide
  Target: ANGPTL4; (-) strand; PAM type: YTN; PAM sequence: TTT
gtgtgtgtgtgtgtgtgtgt

SEQ ID NO: 14055 - DNA, 20 bp, Artificial Sequence
  Description of Artificial Sequence: Synthetic oligonucleotide
  Target: ANGPTL4; (-) strand; PAM type: YTN; PAM sequence: TTT
tgtgtgtgtgtgtgtgtgtg

SEQ ID NO: 14056 - DNA, 20 bp, Artificial Sequence
  Description of Artificial Sequence: Synthetic oligonucleotide
  Target: ANGPTL4; (-) strand; PAM type: YTN; PAM sequence: TTA
ttttgtgtgtgtgtgtgtgt

SEQ ID NO: 14057 - DNA, 20 bp, Artificial Sequence
  Description of Artificial Sequence: Synthetic oligonucleotide
  Target: ANGPTL4; (-) strand; PAM type: YTN; PAM sequence: TTT
attttgtgtgtgtgtgtgtg

SEQ ID NO: 14058 - DNA, 20 bp, Artificial Sequence
  Description of Artificial Sequence: Synthetic oligonucleotide
  Target: ANGPTL4; (-) strand; PAM type: YTN; PAM sequence: TTA
tttattttgtgtgtgtgtgt

SEQ ID NO: 14059 - DNA, 20 bp, Artificial Sequence
  Description of Artificial Sequence: Synthetic oligonucleotide
  Target: ANGPTL4; (-) strand; PAM type: YTN; PAM sequence: TTT
atttattttgtgtgtgtgtg

SEQ ID NO: 14060 - DNA, 20 bp, Artificial Sequence
  Description of Artificial Sequence: Synthetic oligonucleotide
  Target: ANGPTL4; (-) strand; PAM type: YTN; PAM sequence: TTT
tatttattttgtgtgtgtgt

SEQ ID NO: 14061 - DNA, 20 bp, Artificial Sequence
  Description of Artificial Sequence: Synthetic oligonucleotide
  Target: ANGPTL4; (-) strand; PAM type: YTN; PAM sequence: TTA
ttttatttattttgtgtgtg

SEQ ID NO: 14062 - DNA, 20 bp, Artificial Sequence
  Description of Artificial Sequence: Synthetic oligonucleotide
  Target: ANGPTL4; (-) strand; PAM type: YTN; PAM sequence: TTT
attttatttattttgtgtgt

SEQ ID NO: 14063 - DNA, 20 bp, Artificial Sequence
  Description of Artificial Sequence: Synthetic oligonucleotide
  Target: ANGPTL4; (-) strand; PAM type: YTN; PAM sequence: TTT
tattttatttattttgtgtg

SEQ ID NO: 14064 - DNA, 20 bp, Artificial Sequence
  Description of Artificial Sequence: Synthetic oligonucleotide
  Target: ANGPTL4; (-) strand; PAM type: YTN; PAM sequence: TTA
ttttattttatttattttgt

SEQ ID NO: 14065 - DNA, 20 bp, Artificial Sequence
  Description of Artificial Sequence: Synthetic oligonucleotide
  Target: ANGPTL4; (-) strand; PAM type: YTN; PAM sequence: TTT
attttattttatttattttg

SEQ ID NO: 14066 - DNA, 20 bp, Artificial Sequence
  Description of Artificial Sequence: Synthetic oligonucleotide
  Target: ANGPTL4; (-) strand; PAM type: YTN; PAM sequence: TTT
tattttattttatttatttt

SEQ ID NO: 14067 - DNA, 20 bp, Artificial Sequence
  Description of Artificial Sequence: Synthetic oligonucleotide
  Target: ANGPTL4; (-) strand; PAM type: YTN; PAM sequence: TTA
ttttattttattttatttat

SEQ ID NO: 14068 - DNA, 20 bp, Artificial Sequence
  Description of Artificial Sequence: Synthetic oligonucleotide
  Target: ANGPTL4; (-) strand; PAM type: YTN; PAM sequence: TTT
attttattttattttattta

SEQ ID NO: 14069 - DNA, 20 bp, Artificial Sequence
  Description of Artificial Sequence: Synthetic oligonucleotide
  Target: ANGPTL4; (-) strand; PAM type: YTN; PAM sequence: TTA
tatttattttattttatttt

SEQ ID NO: 14070 - DNA, 20 bp, Artificial Sequence
  Description of Artificial Sequence: Synthetic oligonucleotide
  Target: ANGPTL4; (-) strand; PAM type: YTN; PAM sequence: TTT
atatttattttattttattt

SEQ ID NO: 14071 - DNA, 20 bp, Artificial Sequence
  Description of Artificial Sequence: Synthetic oligonucleotide
  Target: ANGPTL4; (-) strand; PAM type: YTN; PAM sequence: TTT
tatatttattttattttatt

SEQ ID NO: 14072 - DNA, 20 bp, Artificial Sequence
  Description of Artificial Sequence: Synthetic oligonucleotide
  Target: ANGPTL4; (-) strand; PAM type: YTN; PAM sequence: TTA
attttatatttattttattt

SEQ ID NO: 14073 - DNA, 20 bp, Artificial Sequence
  Description of Artificial Sequence: Synthetic oligonucleotide
  Target: ANGPTL4; (-) strand; PAM type: YTN; PAM sequence: TTT
aattttatatttattttatt

SEQ ID NO: 14074 - DNA, 20 bp, Artificial Sequence
  Description of Artificial Sequence: Synthetic oligonucleotide
  Target: ANGPTL4; (-) strand; PAM type: YTN; PAM sequence: TTT
taattttatatttattttat

SEQ ID NO: 14075 - DNA, 20 bp, Artificial Sequence
  Description of Artificial Sequence: Synthetic oligonucleotide
  Target: ANGPTL4; (-) strand; PAM type: YTN; PAM sequence: TTT
ttaattttatatttatttta

SEQ ID NO: 14076 - DNA, 20 bp, Artificial Sequence
  Description of Artificial Sequence: Synthetic oligonucleotide
  Target: ANGPTL4; (-) strand; PAM type: YTN; PAM sequence: TTT
tttaattttatatttatttt

SEQ ID NO: 14077 - DNA, 20 bp, Artificial Sequence
  Description of Artificial Sequence: Synthetic oligonucleotide
  Target: ANGPTL4; (-) strand; PAM type: YTN; PAM sequence: CTG
cgcccggtcgttttttaatt

SEQ ID NO: 14078 - DNA, 20 bp, Artificial Sequence
  Description of Artificial Sequence: Synthetic oligonucleotide
  Target: ANGPTL4; (-) strand; PAM type: YTN; PAM sequence: CTC
cgtgagccactgcgcccggt

SEQ ID NO: 14079 - DNA, 20 bp, Artificial Sequence
  Description of Artificial Sequence: Synthetic oligonucleotide
  Target: ANGPTL4; (-) strand; PAM type: YTN; PAM sequence: CTC
gacagcaggtggaggctccg

SEQ ID NO: 14080 - DNA, 20 bp, Artificial Sequence
  Description of Artificial Sequence: Synthetic oligonucleotide
  Target: ANGPTL4; (-) strand; PAM type: YTN; PAM sequence: CTA
gtctcgacagcaggtggagg

SEQ ID NO: 14081 - DNA, 20 bp, Artificial Sequence
  Description of Artificial Sequence: Synthetic oligonucleotide
  Target: ANGPTL4; (-) strand; PAM type: YTN; PAM sequence: TTG
gccaggctagtctcgacagc

SEQ ID NO: 14082 - DNA, 20 bp, Artificial Sequence
  Description of Artificial Sequence: Synthetic oligonucleotide
  Target: ANGPTL4; (-) strand; PAM type: YTN; PAM sequence: CTC
catgttggccaggctagtct

SEQ ID NO: 14083 - DNA, 20 bp, Artificial Sequence
  Description of Artificial Sequence: Synthetic oligonucleotide
  Target: ANGPTL4; (-) strand; PAM type: YTN; PAM sequence: TTC
tccatgttggccaggctagt

SEQ ID NO: 14084 - DNA, 20 bp, Artificial Sequence
  Description of Artificial Sequence: Synthetic oligonucleotide
  Target: ANGPTL4; (-) strand; PAM type: YTN; PAM sequence: TTT
ctccatgttggccaggctag

SEQ ID NO: 14085 - DNA, 20 bp, Artificial Sequence
  Description of Artificial Sequence: Synthetic oligonucleotide
  Target: ANGPTL4; (-) strand; PAM type: YTN; PAM sequence: TTA
gtagagacgaggtttctcca

SEQ ID NO: 14086 - DNA, 20 bp, Artificial Sequence
  Description of Artificial Sequence: Synthetic oligonucleotide
  Target: ANGPTL4; (-) strand; PAM type: YTN; PAM sequence: TTT
agtagagacgaggtttctcc

SEQ ID NO: 14087 - DNA, 20 bp, Artificial Sequence
  Description of Artificial Sequence: Synthetic oligonucleotide
  Target: ANGPTL4; (-) strand; PAM type: YTN; PAM sequence: TTT
tagtagagacgaggtttctc

SEQ ID NO: 14088 - DNA, 20 bp, Artificial Sequence
  Description of Artificial Sequence: Synthetic oligonucleotide
  Target: ANGPTL4; (-) strand; PAM type: YTN; PAM sequence: TTT
ttagtagagacgaggtttct

SEQ ID NO: 14089 - DNA, 20 bp, Artificial Sequence
  Description of Artificial Sequence: Synthetic oligonucleotide
  Target: ANGPTL4; (-) strand; PAM type: YTN; PAM sequence: TTG
tatttttagtagagacgagg

SEQ ID NO: 14090 - DNA, 20 bp, Artificial Sequence
  Description of Artificial Sequence: Synthetic oligonucleotide
  Target: ANGPTL4; (-) strand; PAM type: YTN; PAM sequence: TTT
gtatttttagtagagacgag

SEQ ID NO: 14091 - DNA, 20 bp, Artificial Sequence
  Description of Artificial Sequence: Synthetic oligonucleotide
  Target: ANGPTL4; (-) strand; PAM type: YTN; PAM sequence: TTT
tgtatttttagtagagacga

SEQ ID NO: 14092 - DNA, 20 bp, Artificial Sequence
  Description of Artificial Sequence: Synthetic oligonucleotide
  Target: ANGPTL4; (-) strand; PAM type: YTN; PAM sequence: TTT
ttgtatttttagtagagacg

SEQ ID NO: 14093 - DNA, 20 bp, Artificial Sequence
  Description of Artificial Sequence: Synthetic oligonucleotide
  Target: ANGPTL4; (-) strand; PAM type: YTN; PAM sequence: TTT
tttgtatttttagtagagac

SEQ ID NO: 14094 - DNA, 20 bp, Artificial Sequence
  Description of Artificial Sequence: Synthetic oligonucleotide
  Target: ANGPTL4; (-) strand; PAM type: YTN; PAM sequence: CTA
attttttgtatttttagtag

SEQ ID NO: 14095 - DNA, 20 bp, Artificial Sequence
  Description of Artificial Sequence: Synthetic oligonucleotide
  Target: ANGPTL4; (-) strand; PAM type: YTN; PAM sequence: TTA
caggcatgcacaccatgcca

SEQ ID NO: 14096 - DNA, 20 bp, Artificial Sequence
  Description of Artificial Sequence: Synthetic oligonucleotide
  Target: ANGPTL4; (-) strand; PAM type: YTN; PAM sequence: CTG
ggattacaggcatgcacacc

SEQ ID NO: 14097 - DNA, 20 bp, Artificial Sequence
  Description of Artificial Sequence: Synthetic oligonucleotide
  Target: ANGPTL4; (-) strand; PAM type: YTN; PAM sequence: CTC
ccaagtagctgggattacag

SEQ ID NO: 14098 - DNA, 20 bp, Artificial Sequence
  Description of Artificial Sequence: Synthetic oligonucleotide
  Target: ANGPTL4; (-) strand; PAM type: YTN; PAM sequence: CTC
agcctcccaagtagctggga

SEQ ID NO: 14099 - DNA, 20 bp, Artificial Sequence
  Description of Artificial Sequence: Synthetic oligonucleotide
  Target: ANGPTL4; (-) strand; PAM type: YTN; PAM sequence: CTG
cctcagcctcccaagtagct

SEQ ID NO: 14100 - DNA, 20 bp, Artificial Sequence
  Description of Artificial Sequence: Synthetic oligonucleotide
  Target: ANGPTL4; (-) strand; PAM type: YTN; PAM sequence: CTC
ctgcctcagcctcccaagta

SEQ ID NO: 14101 - DNA, 20 bp, Artificial Sequence
  Description of Artificial Sequence: Synthetic oligonucleotide
  Target: ANGPTL4; (-) strand; PAM type: YTN; PAM sequence: TTC
tcctgcctcagcctcccaag

SEQ ID NO: 14102 - DNA, 20 bp, Artificial Sequence
  Description of Artificial Sequence: Synthetic oligonucleotide
  Target: ANGPTL4; (-) strand; PAM type: YTN; PAM sequence: TTC
aagagattctcctgcctcag

SEQ ID NO: 14103 - DNA, 20 bp, Artificial Sequence
  Description of Artificial Sequence: Synthetic oligonucleotide
  Target: ANGPTL4; (-) strand; PAM type: YTN; PAM sequence: CTC
ccgggttcaagagattctcc

SEQ ID NO: 14104 - DNA, 20 bp, Artificial Sequence
  Description of Artificial Sequence: Synthetic oligonucleotide
  Target: ANGPTL4; (-) strand; PAM type: YTN; PAM sequence: CTG
cctcccgggttcaagagatt

SEQ ID NO: 14105 - DNA, 20 bp, Artificial Sequence
  Description of Artificial Sequence: Synthetic oligonucleotide
  Target: ANGPTL4; (-) strand; PAM type: YTN; PAM sequence: CTC
tgcctcccgggttcaagaga

SEQ ID NO: 14106 - DNA, 20 bp, Artificial Sequence
  Description of Artificial Sequence: Synthetic oligonucleotide
  Target: ANGPTL4; (-) strand; PAM type: YTN; PAM sequence: CTG
caacctctgcctcccgggtt

SEQ ID NO: 14107 - DNA, 20 bp, Artificial Sequence
  Description of Artificial Sequence: Synthetic oligonucleotide
  Target: ANGPTL4; (-) strand; PAM type: YTN; PAM sequence: CTC
actgcaacctctgcctcccg

SEQ ID NO: 14108 - DNA, 20 bp, Artificial Sequence
  Description of Artificial Sequence: Synthetic oligonucleotide
  Target: ANGPTL4; (-) strand; PAM type: YTN; PAM sequence: CTC
ggctcactgcaacctctgcc

SEQ ID NO: 14109 - DNA, 20 bp, Artificial Sequence
  Description of Artificial Sequence: Synthetic oligonucleotide
  Target: ANGPTL4; (-) strand; PAM type: YTN; PAM sequence: CTG
cgatctcggctcactgcaac

SEQ ID NO: 14110 - DNA, 20 bp, Artificial Sequence
  Description of Artificial Sequence: Synthetic oligonucleotide
  Target: ANGPTL4; (-) strand; PAM type: YTN; PAM sequence: CTG
gagtgcagtgctgcgatctc

SEQ ID NO: 14111 - DNA, 20 bp, Artificial Sequence
  Description of Artificial Sequence: Synthetic oligonucleotide
  Target: ANGPTL4; (-) strand; PAM type: YTN; PAM sequence: TTG
cccaggctggagtgcagtgc

SEQ ID NO: 14112 - DNA, 20 bp, Artificial Sequence
  Description of Artificial Sequence: Synthetic oligonucleotide
  Target: ANGPTL4; (-) strand; PAM type: YTN; PAM sequence: CTG
ttgcccaggctggagtgcag

SEQ ID NO: 14113 - DNA, 20 bp, Artificial Sequence
  Description of Artificial Sequence: Synthetic oligonucleotide
  Target: ANGPTL4; (-) strand; PAM type: YTN; PAM sequence: CTC
tgttgcccaggctggagtgc

SEQ ID NO: 14114 - DNA, 20 bp, Artificial Sequence
  Description of Artificial Sequence: Synthetic oligonucleotide
  Target: ANGPTL4; (-) strand; PAM type: YTN; PAM sequence: CTC
actctgttgcccaggctgga

SEQ ID NO: 14115 - DNA, 20 bp, Artificial Sequence
  Description of Artificial Sequence: Synthetic oligonucleotide
  Target: ANGPTL4; (-) strand; PAM type: YTN; PAM sequence: TTG
aggagtctcactctgttgcc

SEQ ID NO: 14116 - DNA, 20 bp, Artificial Sequence
  Description of Artificial Sequence: Synthetic oligonucleotide
  Target: ANGPTL4; (-) strand; PAM type: YTN; PAM sequence: TTT
gaggagtctcactctgttgc

SEQ ID NO: 14117 - DNA, 20 bp, Artificial Sequence
  Description of Artificial Sequence: Synthetic oligonucleotide
  Target: ANGPTL4; (-) strand; PAM type: YTN; PAM sequence: TTT
tgaggagtctcactctgttg

SEQ ID NO: 14118 - DNA, 20 bp, Artificial Sequence
  Description of Artificial Sequence: Synthetic oligonucleotide
  Target: ANGPTL4; (-) strand; PAM type: YTN; PAM sequence: TTT
ttgaggagtctcactctgtt

SEQ ID NO: 14119 - DNA, 20 bp, Artificial Sequence
  Description of Artificial Sequence: Synthetic oligonucleotide
  Target: ANGPTL4; (-) strand; PAM type: YTN; PAM sequence: TTT
tttgaggagtctcactctgt

SEQ ID NO: 14120 - DNA, 20 bp, Artificial Sequence
  Description of Artificial Sequence: Synthetic oligonucleotide
  Target: ANGPTL4; (-) strand; PAM type: YTN; PAM sequence: TTT
ttttgaggagtctcactctg

SEQ ID NO: 14121 - DNA, 20 bp, Artificial Sequence
  Description of Artificial Sequence: Synthetic oligonucleotide
  Target: ANGPTL4; (-) strand; PAM type: YTN; PAM sequence: TTA
tttttttgaggagtctcact

SEQ ID NO: 14122 - DNA, 20 bp, Artificial Sequence
  Description of Artificial Sequence: Synthetic oligonucleotide
  Target: ANGPTL4; (-) strand; PAM type: YTN; PAM sequence: CTA
ttatttttttgaggagtctc

SEQ ID NO: 14123 - DNA, 20 bp, Artificial Sequence
  Description of Artificial Sequence: Synthetic oligonucleotide
  Target: ANGPTL4; (-) strand; PAM type: YTN; PAM sequence: TTA
tcgctattatttttttgagg

SEQ ID NO: 14124 - DNA, 20 bp, Artificial Sequence
  Description of Artificial Sequence: Synthetic oligonucleotide
  Target: ANGPTL4; (-) strand; PAM type: YTN; PAM sequence: TTT
atcgctattatttttttgag

SEQ ID NO: 14125 - DNA, 20 bp, Artificial Sequence
  Description of Artificial Sequence: Synthetic oligonucleotide
  Target: ANGPTL4; (-) strand; PAM type: YTN; PAM sequence: TTT
tatcgctattatttttttga

SEQ ID NO: 14126 - DNA, 20 bp, Artificial Sequence
  Description of Artificial Sequence: Synthetic oligonucleotide
  Target: ANGPTL4; (-) strand; PAM type: YTN; PAM sequence: TTA
ttttatcgctattatttttt

SEQ ID NO: 14127 - DNA, 20 bp, Artificial Sequence
  Description of Artificial Sequence: Synthetic oligonucleotide
  Target: ANGPTL4; (-) strand; PAM type: YTN; PAM sequence: TTT
attttatcgctattattttt

SEQ ID NO: 14128 - DNA, 20 bp, Artificial Sequence
  Description of Artificial Sequence: Synthetic oligonucleotide
  Target: ANGPTL4; (-) strand; PAM type: YTN; PAM sequence: TTT
tattttatcgctattatttt

SEQ ID NO: 14129 - DNA, 20 bp, Artificial Sequence
  Description of Artificial Sequence: Synthetic oligonucleotide
  Target: ANGPTL4; (-) strand; PAM type: YTN; PAM sequence: TTT
ttattttatcgctattattt

SEQ ID NO: 14130 - DNA, 20 bp, Artificial Sequence
  Description of Artificial Sequence: Synthetic oligonucleotide
  Target: ANGPTL4; (-) strand; PAM type: YTN; PAM sequence: TTA
tttttattttatcgctatta

SEQ ID NO: 14131 - DNA, 20 bp, Artificial Sequence
  Description of Artificial Sequence: Synthetic oligonucleotide
  Target: ANGPTL4; (-) strand; PAM type: YTN; PAM sequence: TTT
atttttattttatcgctatt

SEQ ID NO: 14132 - DNA, 20 bp, Artificial Sequence
  Description of Artificial Sequence: Synthetic oligonucleotide
  Target: ANGPTL4; (-) strand; PAM type: YTN; PAM sequence: CTT
tatttttattttatcgctat

SEQ ID NO: 14133 - DNA, 20 bp, Artificial Sequence
  Description of Artificial Sequence: Synthetic oligonucleotide
  Target: ANGPTL4; (-) strand; PAM type: YTN; PAM sequence: CTG
gctttatttttattttatcg

SEQ ID NO: 14134 - DNA, 20 bp, Artificial Sequence
  Description of Artificial Sequence: Synthetic oligonucleotide
  Target: ANGPTL4; (-) strand; PAM type: YTN; PAM sequence: CTA
caagcgtgagtcaccgcacc

SEQ ID NO: 14135 - DNA, 20 bp, Artificial Sequence
  Description of Artificial Sequence: Synthetic oligonucleotide
  Target: ANGPTL4; (-) strand; PAM type: YTN; PAM sequence: CTG
ggactacaagcgtgagtcac

SEQ ID NO: 14136 - DNA, 20 bp, Artificial Sequence
  Description of Artificial Sequence: Synthetic oligonucleotide
  Target: ANGPTL4; (-) strand; PAM type: YTN; PAM sequence: CTC
ccaaagtgctgggactacaa

SEQ ID NO: 14137 - DNA, 20 bp, Artificial Sequence
  Description of Artificial Sequence: Synthetic oligonucleotide
  Target: ANGPTL4; (-) strand; PAM type: YTN; PAM sequence: CTC
gccctcccaaagtgctggga

SEQ ID NO: 14138 - DNA, 20 bp, Artificial Sequence
  Description of Artificial Sequence: Synthetic oligonucleotide
  Target: ANGPTL4; (-) strand; PAM type: YTN; PAM sequence: CTG
gcctcgccctcccaaagtgc

SEQ ID NO: 14139 - DNA, 20 bp, Artificial Sequence
  Description of Artificial Sequence: Synthetic oligonucleotide
  Target: ANGPTL4; (-) strand; PAM type: YTN; PAM sequence: CTC
aggtgatccactggcctcgc

SEQ ID NO: 14140 - DNA, 20 bp, Artificial Sequence
  Description of Artificial Sequence: Synthetic oligonucleotide
  Target: ANGPTL4; (-) strand; PAM type: YTN; PAM sequence: CTG
acctcaggtgatccactggc

SEQ ID NO: 14141 - DNA, 20 bp, Artificial Sequence
  Description of Artificial Sequence: Synthetic oligonucleotide
  Target: ANGPTL4; (-) strand; PAM type: YTN; PAM sequence: CTC
ctgacctcaggtgatccact

SEQ ID NO: 14142 - DNA, 20 bp, Artificial Sequence
  Description of Artificial Sequence: Synthetic oligonucleotide
  Target: ANGPTL4; (-) strand; PAM type: YTN; PAM sequence: TTG
aactcctgacctcaggtgat

SEQ ID NO: 14143 - DNA, 20 bp, Artificial Sequence
  Description of Artificial Sequence: Synthetic oligonucleotide
  Target: ANGPTL4; (-) strand; PAM type: YTN; PAM sequence: CTT
gaactcctgacctcaggtga

SEQ ID NO: 14144 - DNA, 20 bp, Artificial Sequence
  Description of Artificial Sequence: Synthetic oligonucleotide
  Target: ANGPTL4; (-) strand; PAM type: YTN; PAM sequence: CTG
gtcttgaactcctgacctca

SEQ ID NO: 14145 - DNA, 20 bp, Artificial Sequence
  Description of Artificial Sequence: Synthetic oligonucleotide
  Target: ANGPTL4; (-) strand; PAM type: YTN; PAM sequence: TTG
gtcaggctggtcttgaactc

SEQ ID NO: 14146 - DNA, 20 bp, Artificial Sequence
  Description of Artificial Sequence: Synthetic oligonucleotide
  Target: ANGPTL4; (-) strand; PAM type: YTN; PAM sequence: CTG
tgttggtcaggctggtcttg

SEQ ID NO: 14147 - DNA, 20 bp, Artificial Sequence
  Description of Artificial Sequence: Synthetic oligonucleotide
  Target: ANGPTL4; (-) strand; PAM type: YTN; PAM sequence: TTC
actgtgttggtcaggctggt

SEQ ID NO: 14148 - DNA, 20 bp, Artificial Sequence
  Description of Artificial Sequence: Synthetic oligonucleotide
  Target: ANGPTL4; (-) strand; PAM type: YTN; PAM sequence: TTT
cactgtgttggtcaggctgg

SEQ ID NO: 14149 - DNA, 20 bp, Artificial Sequence
  Description of Artificial Sequence: Synthetic oligonucleotide
  Target: ANGPTL4; (-) strand; PAM type: YTN; PAM sequence: TTA
gtagagacggggtttcactg

SEQ ID NO: 14150 - DNA, 20 bp, Artificial Sequence
  Description of Artificial Sequence: Synthetic oligonucleotide
  Target: ANGPTL4; (-) strand; PAM type: YTN; PAM sequence: TTT
agtagagacggggtttcact

SEQ ID NO: 14151 - DNA, 20 bp, Artificial Sequence
  Description of Artificial Sequence: Synthetic oligonucleotide
  Target: ANGPTL4; (-) strand; PAM type: YTN; PAM sequence: TTT
tagtagagacggggtttcac

SEQ ID NO: 14152 - DNA, 20 bp, Artificial Sequence
  Description of Artificial Sequence: Synthetic oligonucleotide
  Target: ANGPTL4; (-) strand; PAM type: YTN; PAM sequence: TTT
ttagtagagacggggtttca

SEQ ID NO: 14153 - DNA, 20 bp, Artificial Sequence
  Description of Artificial Sequence: Synthetic oligonucleotide
  Target: ANGPTL4; (-) strand; PAM type: YTN; PAM sequence: TTG
tatttttagtagagacgggg

SEQ ID NO: 14154 - DNA, 20 bp, Artificial Sequence
  Description of Artificial Sequence: Synthetic oligonucleotide
  Target: ANGPTL4; (-) strand; PAM type: YTN; PAM sequence: TTT
gtatttttagtagagacggg

SEQ ID NO: 14155 - DNA, 20 bp, Artificial Sequence
  Description of Artificial Sequence: Synthetic oligonucleotide
  Target: ANGPTL4; (-) strand; PAM type: YTN; PAM sequence: TTT
tgtatttttagtagagacgg

SEQ ID NO: 14156 - DNA, 20 bp, Artificial Sequence
  Description of Artificial Sequence: Synthetic oligonucleotide
  Target: ANGPTL4; (-) strand; PAM type: YTN; PAM sequence: TTT
ttgtatttttagtagagacg

SEQ ID NO: 14157 - DNA, 20 bp, Artificial Sequence
  Description of Artificial Sequence: Synthetic oligonucleotide
  Target: ANGPTL4; (-) strand; PAM type: YTN; PAM sequence: CTA
atttttgtatttttagtaga

SEQ ID NO: 14158 - DNA, 20 bp, Artificial Sequence
  Description of Artificial Sequence: Synthetic oligonucleotide
  Target: ANGPTL4; (-) strand; PAM type: YTN; PAM sequence: TTA
caggcgcccaccaccacacc

SEQ ID NO: 14159 - DNA, 20 bp, Artificial Sequence
  Description of Artificial Sequence: Synthetic oligonucleotide
  Target: ANGPTL4; (-) strand; PAM type: YTN; PAM sequence: CTG
ggattacaggcgcccaccac

SEQ ID NO: 14160 - DNA, 20 bp, Artificial Sequence
  Description of Artificial Sequence: Synthetic oligonucleotide
  Target: ANGPTL4; (-) strand; PAM type: YTN; PAM sequence: CTC
cccagtagctgggattacag

SEQ ID NO: 14161 - DNA, 20 bp, Artificial Sequence
  Description of Artificial Sequence: Synthetic oligonucleotide
  Target: ANGPTL4; (-) strand; PAM type: YTN; PAM sequence: CTC
agcctccccagtagctggga

SEQ ID NO: 14162 - DNA, 20 bp, Artificial Sequence
  Description of Artificial Sequence: Synthetic oligonucleotide
  Target: ANGPTL4; (-) strand; PAM type: YTN; PAM sequence: CTG
cctcagcctccccagtagct

SEQ ID NO: 14163 - DNA, 20 bp, Artificial Sequence
  Description of Artificial Sequence: Synthetic oligonucleotide
  Target: ANGPTL4; (-) strand; PAM type: YTN; PAM sequence: CTC
ctgcctcagcctccccagta

SEQ ID NO: 14164 - DNA, 20 bp, Artificial Sequence
  Description of Artificial Sequence: Synthetic oligonucleotide
  Target: ANGPTL4; (-) strand; PAM type: YTN; PAM sequence: TTC
tcctgcctcagcctccccag

SEQ ID NO: 14165 - DNA, 20 bp, Artificial Sequence
  Description of Artificial Sequence: Synthetic oligonucleotide
  Target: ANGPTL4; (-) strand; PAM type: YTN; PAM sequence: TTC
aagaggttctcctgcctcag

SEQ ID NO: 14166 - DNA, 20 bp, Artificial Sequence
  Description of Artificial Sequence: Synthetic oligonucleotide
  Target: ANGPTL4; (-) strand; PAM type: YTN; PAM sequence: CTC
ccgggttcaagaggttctcc

SEQ ID NO: 14167 - DNA, 20 bp, Artificial Sequence
  Description of Artificial Sequence: Synthetic oligonucleotide
  Target: ANGPTL4; (-) strand; PAM type: YTN; PAM sequence: CTC
cgcctcccgggttcaagagg

SEQ ID NO: 14168 - DNA, 20 bp, Artificial Sequence
  Description of Artificial Sequence: Synthetic oligonucleotide
  Target: ANGPTL4; (-) strand; PAM type: YTN; PAM sequence: CTG
caacctccgcctcccgggtt

SEQ ID NO: 14169 - DNA, 20 bp, Artificial Sequence
  Description of Artificial Sequence: Synthetic oligonucleotide
  Target: ANGPTL4; (-) strand; PAM type: YTN; PAM sequence: CTC
actgcaacctccgcctcccg

SEQ ID NO: 14170 - DNA, 20 bp, Artificial Sequence
  Description of Artificial Sequence: Synthetic oligonucleotide
  Target: ANGPTL4; (-) strand; PAM type: YTN; PAM sequence: CTG
gagtgcaatggcatgatccc

SEQ ID NO: 14171 - DNA, 20 bp, Artificial Sequence
  Description of Artificial Sequence: Synthetic oligonucleotide
  Target: ANGPTL4; (-) strand; PAM type: YTN; PAM sequence: CTG
tcgcccaggctggagtgcaa

SEQ ID NO: 14172 - DNA, 20 bp, Artificial Sequence
  Description of Artificial Sequence: Synthetic oligonucleotide
  Target: ANGPTL4; (-) strand; PAM type: YTN; PAM sequence: CTC
tgtcgcccaggctggagtgc

SEQ ID NO: 14173 - DNA, 20 bp, Artificial Sequence
  Description of Artificial Sequence: Synthetic oligonucleotide
  Target: ANGPTL4; (-) strand; PAM type: YTN; PAM sequence: TTG
agatggagtcgagctctgtc

SEQ ID NO: 14174 - DNA, 20 bp, Artificial Sequence
  Description of Artificial Sequence: Synthetic oligonucleotide
  Target: ANGPTL4; (-) strand; PAM type: YTN; PAM sequence: TTT
gagatggagtcgagctctgt

SEQ ID NO: 14175 - DNA, 20 bp, Artificial Sequence
  Description of Artificial Sequence: Synthetic oligonucleotide
  Target: ANGPTL4; (-) strand; PAM type: YTN; PAM sequence: TTT
tgagatggagtcgagctctg

SEQ ID NO: 14176 - DNA, 20 bp, Artificial Sequence
  Description of Artificial Sequence: Synthetic oligonucleotide
  Target: ANGPTL4; (-) strand; PAM type: YTN; PAM sequence: TTA
ttttgagatggagtcgagct

SEQ ID NO: 14177 - DNA, 20 bp, Artificial Sequence
  Description of Artificial Sequence: Synthetic oligonucleotide
  Target: ANGPTL4; (-) strand; PAM type: YTN; PAM sequence: TTA
ttattttgagatggagtcga

SEQ ID NO: 14178 - DNA, 20 bp, Artificial Sequence
  Description of Artificial Sequence: Synthetic oligonucleotide
  Target: ANGPTL4; (-) strand; PAM type: YTN; PAM sequence: TTA
ttattattttgagatggagt

SEQ ID NO: 14179 - DNA, 20 bp, Artificial Sequence
  Description of Artificial Sequence: Synthetic oligonucleotide
  Target: ANGPTL4; (-) strand; PAM type: YTN; PAM sequence: TTA
ttattattattttgagatgg

SEQ ID NO: 14180 - DNA, 20 bp, Artificial Sequence
  Description of Artificial Sequence: Synthetic oligonucleotide
  Target: ANGPTL4; (-) strand; PAM type: YTN; PAM sequence: TTA
ttattattattattttgaga

SEQ ID NO: 14181 - DNA, 20 bp, Artificial Sequence
  Description of Artificial Sequence: Synthetic oligonucleotide
  Target: ANGPTL4; (-) strand; PAM type: YTN; PAM sequence: TTT
attattattattattttgag

SEQ ID NO: 14182 - DNA, 20 bp, Artificial Sequence
  Description of Artificial Sequence: Synthetic oligonucleotide
  Target: ANGPTL4; (-) strand; PAM type: YTN; PAM sequence: TTA
tttattattattattatttt

SEQ ID NO: 14183 - DNA, 20 bp, Artificial Sequence
  Description of Artificial Sequence: Synthetic oligonucleotide
  Target: ANGPTL4; (-) strand; PAM type: YTN; PAM sequence: TTT
atttattattattattattt

SEQ ID NO: 14184 - DNA, 20 bp, Artificial Sequence
  Description of Artificial Sequence: Synthetic oligonucleotide
  Target: ANGPTL4; (-) strand; PAM type: YTN; PAM sequence: TTT
tatttattattattattatt

SEQ ID NO: 14185 - DNA, 20 bp, Artificial Sequence
  Description of Artificial Sequence: Synthetic oligonucleotide
  Target: ANGPTL4; (-) strand; PAM type: YTN; PAM sequence: TTA
ttttatttattattattatt

SEQ ID NO: 14186 - DNA, 20 bp, Artificial Sequence
  Description of Artificial Sequence: Synthetic oligonucleotide
  Target: ANGPTL4; (-) strand; PAM type: YTN; PAM sequence: TTT
attttatttattattattat

SEQ ID NO: 14187 - DNA, 20 bp, Artificial Sequence
  Description of Artificial Sequence: Synthetic oligonucleotide
  Target: ANGPTL4; (-) strand; PAM type: YTN; PAM sequence: TTT
tattttatttattattatta

SEQ ID NO: 14188 - DNA, 20 bp, Artificial Sequence
  Description of Artificial Sequence: Synthetic oligonucleotide
  Target: ANGPTL4; (-) strand; PAM type: YTN; PAM sequence: TTG
tattttattttatttattat

SEQ ID NO: 14189 - DNA, 20 bp, Artificial Sequence
  Description of Artificial Sequence: Synthetic oligonucleotide
  Target: ANGPTL4; (-) strand; PAM type: YTN; PAM sequence: TTT
gtattttattttatttatta

SEQ ID NO: 14190 - DNA, 20 bp, Artificial Sequence
  Description of Artificial Sequence: Synthetic oligonucleotide
  Target: ANGPTL4; (-) strand; PAM type: YTN; PAM sequence: TTG
tatttgtattttattttatt

SEQ ID NO: 14191 - DNA, 20 bp, Artificial Sequence
  Description of Artificial Sequence: Synthetic oligonucleotide
  Target: ANGPTL4; (-) strand; PAM type: YTN; PAM sequence: TTT
gtatttgtattttattttat

SEQ ID NO: 14192 - DNA, 20 bp, Artificial Sequence
  Description of Artificial Sequence: Synthetic oligonucleotide
  Target: ANGPTL4; (-) strand; PAM type: YTN; PAM sequence: TTT
tgtatttgtattttatttta

SEQ ID NO: 14193 - DNA, 20 bp, Artificial Sequence
  Description of Artificial Sequence: Synthetic oligonucleotide
  Target: ANGPTL4; (-) strand; PAM type: YTN; PAM sequence: TTT
ttgtatttgtattttatttt

SEQ ID NO: 14194 - DNA, 20 bp, Artificial Sequence
  Description of Artificial Sequence: Synthetic oligonucleotide
  Target: ANGPTL4; (-) strand; PAM type: YTN; PAM sequence: CTA
atttttgtatttgtatttta

SEQ ID NO: 14195 - DNA, 20 bp, Artificial Sequence
  Description of Artificial Sequence: Synthetic oligonucleotide
  Target: ANGPTL4; (-) strand; PAM type: YTN; PAM sequence: CTG
gctaatttttgtatttgtat

SEQ ID NO: 14196 - DNA, 20 bp, Artificial Sequence
  Description of Artificial Sequence: Synthetic oligonucleotide
  Target: ANGPTL4; (-) strand; PAM type: YTN; PAM sequence: CTG
ccaccacacctggctaattt

SEQ ID NO: 14197 - DNA, 20 bp, Artificial Sequence
  Description of Artificial Sequence: Synthetic oligonucleotide
  Target: ANGPTL4; (-) strand; PAM type: YTN; PAM sequence: CTC
ccaagtagctgccaccacac

SEQ ID NO: 14198 - DNA, 20 bp, Artificial Sequence
  Description of Artificial Sequence: Synthetic oligonucleotide
  Target: ANGPTL4; (-) strand; PAM type: YTN; PAM sequence: CTC
agcctcccaagtagctgcca

SEQ ID NO: 14199 - DNA, 20 bp, Artificial Sequence
  Description of Artificial Sequence: Synthetic oligonucleotide
  Target: ANGPTL4; (-) strand; PAM type: YTN; PAM sequence: TTG
tgtctcagcctcccaagtag

SEQ ID NO: 14200 - DNA, 20 bp, Artificial Sequence
  Description of Artificial Sequence: Synthetic oligonucleotide
  Target: ANGPTL4; (-) strand; PAM type: YTN; PAM sequence: CTT
gtgtctcagcctcccaagta

SEQ ID NO: 14201 - DNA, 20 bp, Artificial Sequence
  Description of Artificial Sequence: Synthetic oligonucleotide
  Target: ANGPTL4; (-) strand; PAM type: YTN; PAM sequence: TTC
ttgtgtctcagcctcccaag

SEQ ID NO: 14202 - DNA, 20 bp, Artificial Sequence
  Description of Artificial Sequence: Synthetic oligonucleotide
  Target: ANGPTL4; (-) strand; PAM type: YTN; PAM sequence: CTC
aagtgattcttgtgtctcag

SEQ ID NO: 14203 - DNA, 20 bp, Artificial Sequence
  Description of Artificial Sequence: Synthetic oligonucleotide
  Target: ANGPTL4; (-) strand; PAM type: YTN; PAM sequence: CTC
ccagactcaagtgattcttg

SEQ ID NO: 14204 - DNA, 20 bp, Artificial Sequence
  Description of Artificial Sequence: Synthetic oligonucleotide
  Target: ANGPTL4; (-) strand; PAM type: YTN; PAM sequence: CTG
cctcccagactcaagtgatt

SEQ ID NO: 14205 - DNA, 20 bp, Artificial Sequence
  Description of Artificial Sequence: Synthetic oligonucleotide
  Target: ANGPTL4; (-) strand; PAM type: YTN; PAM sequence: CTC
tgcctcccagactcaagtga

SEQ ID NO: 14206 - DNA, 20 bp, Artificial Sequence
  Description of Artificial Sequence: Synthetic oligonucleotide
  Target: ANGPTL4; (-) strand; PAM type: YTN; PAM sequence: CTG
caacctctgcctcccagact

SEQ ID NO: 14207 - DNA, 20 bp, Artificial Sequence
  Description of Artificial Sequence: Synthetic oligonucleotide
  Target: ANGPTL4; (-) strand; PAM type: YTN; PAM sequence: CTC
actgcaacctctgcctccca

SEQ ID NO: 14208 - DNA, 20 bp, Artificial Sequence
  Description of Artificial Sequence: Synthetic oligonucleotide
  Target: ANGPTL4; (-) strand; PAM type: YTN; PAM sequence: TTG
gctcactgcaacctctgcct

SEQ ID NO: 14209 - DNA, 20 bp, Artificial Sequence
  Description of Artificial Sequence: Synthetic oligonucleotide
  Target: ANGPTL4; (-) strand; PAM type: YTN; PAM sequence: CTT
ggctcactgcaacctctgcc

SEQ ID NO: 14210 - DNA, 20 bp, Artificial Sequence
  Description of Artificial Sequence: Synthetic oligonucleotide
  Target: ANGPTL4; (-) strand; PAM type: YTN; PAM sequence: TTG
gagtgcagtggcgcaatctt

SEQ ID NO: 14211 - DNA, 20 bp, Artificial Sequence
  Description of Artificial Sequence: Synthetic oligonucleotide
  Target: ANGPTL4; (-) strand; PAM type: YTN; PAM sequence: CTG
tcacccaggttggagtgcag

SEQ ID NO: 14212 - DNA, 20 bp, Artificial Sequence
  Description of Artificial Sequence: Synthetic oligonucleotide
  Target: ANGPTL4; (-) strand; PAM type: YTN; PAM sequence: CTC
tgtcacccaggttggagtgc

SEQ ID NO: 14213 - DNA, 20 bp, Artificial Sequence
  Description of Artificial Sequence: Synthetic oligonucleotide
  Target: ANGPTL4; (-) strand; PAM type: YTN; PAM sequence: CTC
gctctgtcacccaggttgga

SEQ ID NO: 14214 - DNA, 20 bp, Artificial Sequence
  Description of Artificial Sequence: Synthetic oligonucleotide
  Target: ANGPTL4; (-) strand; PAM type: YTN; PAM sequence: TTC
agacagagtctcgctctgtc

SEQ ID NO: 14215 - DNA, 20 bp, Artificial Sequence
  Description of Artificial Sequence: Synthetic oligonucleotide
  Target: ANGPTL4; (-) strand; PAM type: YTN; PAM sequence: TTT
cagacagagtctcgctctgt

SEQ ID NO: 14216 - DNA, 20 bp, Artificial Sequence
  Description of Artificial Sequence: Synthetic oligonucleotide
  Target: ANGPTL4; (-) strand; PAM type: YTN; PAM sequence: TTT
tcagacagagtctcgctctg

SEQ ID NO: 14217 - DNA, 20 bp, Artificial Sequence
  Description of Artificial Sequence: Synthetic oligonucleotide
  Target: ANGPTL4; (-) strand; PAM type: YTN; PAM sequence: TTT
ttcagacagagtctcgctct

SEQ ID NO: 14218 - DNA, 20 bp, Artificial Sequence
  Description of Artificial Sequence: Synthetic oligonucleotide
  Target: ANGPTL4; (-) strand; PAM type: YTN; PAM sequence: TTT
tttcagacagagtctcgctc

SEQ ID NO: 14219 - DNA, 20 bp, Artificial Sequence
  Description of Artificial Sequence: Synthetic oligonucleotide
  Target: ANGPTL4; (-) strand; PAM type: YTN; PAM sequence: TTA
ttttttcagacagagtctcg

SEQ ID NO: 14220 - DNA, 20 bp, Artificial Sequence
  Description of Artificial Sequence: Synthetic oligonucleotide
  Target: ANGPTL4; (-) strand; PAM type: YTN; PAM sequence: TTT
attttttcagacagagtctc

SEQ ID NO: 14221 - DNA, 20 bp, Artificial Sequence
  Description of Artificial Sequence: Synthetic oligonucleotide
  Target: ANGPTL4; (-) strand; PAM type: YTN; PAM sequence: TTT
tattttttcagacagagtct

SEQ ID NO: 14222 - DNA, 20 bp, Artificial Sequence
  Description of Artificial Sequence: Synthetic oligonucleotide
  Target: ANGPTL4; (-) strand; PAM type: YTN; PAM sequence: TTT
ttattttttcagacagagtc

SEQ ID NO: 14223 - DNA, 20 bp, Artificial Sequence
  Description of Artificial Sequence: Synthetic oligonucleotide
  Target: ANGPTL4; (-) strand; PAM type: YTN; PAM sequence: TTT
tttattttttcagacagagt

SEQ ID NO: 14224 - DNA, 20 bp, Artificial Sequence
  Description of Artificial Sequence: Synthetic oligonucleotide
  Target: ANGPTL4; (-) strand; PAM type: YTN; PAM sequence: TTA
ttttttattttttcagacag

SEQ ID NO: 14225 - DNA, 20 bp, Artificial Sequence
  Description of Artificial Sequence: Synthetic oligonucleotide
  Target: ANGPTL4; (-) strand; PAM type: YTN; PAM sequence: CTT
attttttattttttcagaca

SEQ ID NO: 14226 - DNA, 20 bp, Artificial Sequence
  Description of Artificial Sequence: Synthetic oligonucleotide
  Target: ANGPTL4; (-) strand; PAM type: YTN; PAM sequence: CTG
gcttattttttattttttca

SEQ ID NO: 14227 - DNA, 20 bp, Artificial Sequence
  Description of Artificial Sequence: Synthetic oligonucleotide
  Target: ANGPTL4; (-) strand; PAM type: YTN; PAM sequence: CTA
tgcctggcttattttttatt

SEQ ID NO: 14228 - DNA, 20 bp, Artificial Sequence
  Description of Artificial Sequence: Synthetic oligonucleotide
  Target: ANGPTL4; (-) strand; PAM type: YTN; PAM sequence: CTC
tatgcctggcttatttttta

SEQ ID NO: 14229 - DNA, 20 bp, Artificial Sequence
  Description of Artificial Sequence: Synthetic oligonucleotide
  Target: ANGPTL4; (-) strand; PAM type: YTN; PAM sequence: CTA
cagtcatgcagctctatgcc

SEQ ID NO: 14230 - DNA, 20 bp, Artificial Sequence
  Description of Artificial Sequence: Synthetic oligonucleotide
  Target: ANGPTL4; (-) strand; PAM type: YTN; PAM sequence: CTG
ggactacagtcatgcagctc

SEQ ID NO: 14231 - DNA, 20 bp, Artificial Sequence
  Description of Artificial Sequence: Synthetic oligonucleotide
  Target: ANGPTL4; (-) strand; PAM type: YTN; PAM sequence: CTG
tgtagctgggactacagtca

SEQ ID NO: 14232 - DNA, 20 bp, Artificial Sequence
  Description of Artificial Sequence: Synthetic oligonucleotide
  Target: ANGPTL4; (-) strand; PAM type: YTN; PAM sequence: CTC
ctgtgtagctgggactacag

SEQ ID NO: 14233 - DNA, 20 bp, Artificial Sequence
  Description of Artificial Sequence: Synthetic oligonucleotide
  Target: ANGPTL4; (-) strand; PAM type: YTN; PAM sequence: TTC
agcctcctgtgtagctggga

SEQ ID NO: 14234 - DNA, 20 bp, Artificial Sequence
  Description of Artificial Sequence: Synthetic oligonucleotide
  Target: ANGPTL4; (-) strand; PAM type: YTN; PAM sequence: TTT
cagcctcctgtgtagctggg

SEQ ID NO: 14235 - DNA, 20 bp, Artificial Sequence
  Description of Artificial Sequence: Synthetic oligonucleotide
  Target: ANGPTL4; (-) strand; PAM type: YTN; PAM sequence: TTT
tcagcctcctgtgtagctgg

SEQ ID NO: 14236 - DNA, 20 bp, Artificial Sequence
  Description of Artificial Sequence: Synthetic oligonucleotide
  Target: ANGPTL4; (-) strand; PAM type: YTN; PAM sequence: CTG
ttttcagcctcctgtgtagc

SEQ ID NO: 14237 - DNA, 20 bp, Artificial Sequence
  Description of Artificial Sequence: Synthetic oligonucleotide
  Target: ANGPTL4; (-) strand; PAM type: YTN; PAM sequence: CTC
ctgttttcagcctcctgtgt

SEQ ID NO: 14238 - DNA, 20 bp, Artificial Sequence
  Description of Artificial Sequence: Synthetic oligonucleotide
  Target: ANGPTL4; (-) strand; PAM type: YTN; PAM sequence: CTG
gggtcaggcgatcctcctgt

SEQ ID NO: 14239 - DNA, 20 bp, Artificial Sequence
  Description of Artificial Sequence: Synthetic oligonucleotide
  Target: ANGPTL4; (-) strand; PAM type: YTN; PAM sequence: CTC
ctggggtcaggcgatcctcc

SEQ ID NO: 14240 - DNA, 20 bp, Artificial Sequence
  Description of Artificial Sequence: Synthetic oligonucleotide
  Target: ANGPTL4; (-) strand; PAM type: YTN; PAM sequence: CTC
caactcctggggtcaggcga

SEQ ID NO: 14241 - DNA, 20 bp, Artificial Sequence
  Description of Artificial Sequence: Synthetic oligonucleotide
  Target: ANGPTL4; (-) strand; PAM type: YTN; PAM sequence: CTG
cagcctccaactcctggggt

SEQ ID NO: 14242 - DNA, 20 bp, Artificial Sequence
  Description of Artificial Sequence: Synthetic oligonucleotide
  Target: ANGPTL4; (-) strand; PAM type: YTN; PAM sequence: CTC
actgcagcctccaactcctg

SEQ ID NO: 14243 - DNA, 20 bp, Artificial Sequence
  Description of Artificial Sequence: Synthetic oligonucleotide
  Target: ANGPTL4; (-) strand; PAM type: YTN; PAM sequence: CTG
tcacagctcactgcagcctc

SEQ ID NO: 14244 - DNA, 20 bp, Artificial Sequence
  Description of Artificial Sequence: Synthetic oligonucleotide
  Target: ANGPTL4; (-) strand; PAM type: YTN; PAM sequence: CTG
gagtgcagtggtgctgtcac

SEQ ID NO: 14245 - DNA, 20 bp, Artificial Sequence
  Description of Artificial Sequence: Synthetic oligonucleotide
  Target: ANGPTL4; (-) strand; PAM type: YTN; PAM sequence: CTC
gcccaggctggagtgcagtg

SEQ ID NO: 14246 - DNA, 20 bp, Artificial Sequence
  Description of Artificial Sequence: Synthetic oligonucleotide
  Target: ANGPTL4; (-) strand; PAM type: YTN; PAM sequence: CTC
tcgcccaggctggagtgcag

SEQ ID NO: 14247 - DNA, 20 bp, Artificial Sequence
  Description of Artificial Sequence: Synthetic oligonucleotide
  Target: ANGPTL4; (-) strand; PAM type: YTN; PAM sequence: TTC
tctcgcccaggctggagtgc

SEQ ID NO: 14248 - DNA, 20 bp, Artificial Sequence
  Description of Artificial Sequence: Synthetic oligonucleotide
  Target: ANGPTL4; (-) strand; PAM type: YTN; PAM sequence: CTC
gttctctcgcccaggctgga

SEQ ID NO: 14249 - DNA, 20 bp, Artificial Sequence
  Description of Artificial Sequence: Synthetic oligonucleotide
  Target: ANGPTL4; (-) strand; PAM type: YTN; PAM sequence: TTC
ccaatgacggggtctcgttc

SEQ ID NO: 14250 - DNA, 20 bp, Artificial Sequence
  Description of Artificial Sequence: Synthetic oligonucleotide
  Target: ANGPTL4; (-) strand; PAM type: YTN; PAM sequence: TTT
cccaatgacggggtctcgtt

SEQ ID NO: 14251 - DNA, 20 bp, Artificial Sequence
  Description of Artificial Sequence: Synthetic oligonucleotide
  Target: ANGPTL4; (-) strand; PAM type: YTN; PAM sequence: TTT
tcccaatgacggggtctcgt

SEQ ID NO: 14252 - DNA, 20 bp, Artificial Sequence
  Description of Artificial Sequence: Synthetic oligonucleotide
  Target: ANGPTL4; (-) strand; PAM type: YTN; PAM sequence: TTT
ttcccaatgacggggtctcg

SEQ ID NO: 14253 - DNA, 20 bp, Artificial Sequence
  Description of Artificial Sequence: Synthetic oligonucleotide
  Target: ANGPTL4; (-) strand; PAM type: YTN; PAM sequence: TTT
tttcccaatgacggggtctc

SEQ ID NO: 14254 - DNA, 20 bp, Artificial Sequence
  Description of Artificial Sequence: Synthetic oligonucleotide
  Target: ANGPTL4; (-) strand; PAM type: YTN; PAM sequence: TTT
ttttcccaatgacggggtct

SEQ ID NO: 14255 - DNA, 20 bp, Artificial Sequence
  Description of Artificial Sequence: Synthetic oligonucleotide
  Target: ANGPTL4; (-) strand; PAM type: YTN; PAM sequence: TTT
tttttcccaatgacggggtc

SEQ ID NO: 14256 - DNA, 20 bp, Artificial Sequence
  Description of Artificial Sequence: Synthetic oligonucleotide
  Target: ANGPTL4; (-) strand; PAM type: YTN; PAM sequence: CTT
ttttttcccaatgacggggt

SEQ ID NO: 14257 - DNA, 20 bp, Artificial Sequence
  Description of Artificial Sequence: Synthetic oligonucleotide
  Target: ANGPTL4; (-) strand; PAM type: YTN; PAM sequence: TTC
ttttttttcccaatgacggg

SEQ ID NO: 14258 - DNA, 20 bp, Artificial Sequence
  Description of Artificial Sequence: Synthetic oligonucleotide
  Target: ANGPTL4; (-) strand; PAM type: YTN; PAM sequence: TTT
cttttttttcccaatgacgg

SEQ ID NO: 14259 - DNA, 20 bp, Artificial Sequence
  Description of Artificial Sequence: Synthetic oligonucleotide
  Target: ANGPTL4; (-) strand; PAM type: YTN; PAM sequence: TTT
tcttttttttcccaatgacg

SEQ ID NO: 14260 - DNA, 20 bp, Artificial Sequence
  Description of Artificial Sequence: Synthetic oligonucleotide
  Target: ANGPTL4; (-) strand; PAM type: YTN; PAM sequence: TTT
ttcttttttttcccaatgac

SEQ ID NO: 14261 - DNA, 20 bp, Artificial Sequence
  Description of Artificial Sequence: Synthetic oligonucleotide
  Target: ANGPTL4; (-) strand; PAM type: YTN; PAM sequence: TTT
tttcttttttttcccaatga

SEQ ID NO: 14262 - DNA, 20 bp, Artificial Sequence
  Description of Artificial Sequence: Synthetic oligonucleotide
  Target: ANGPTL4; (-) strand; PAM type: YTN; PAM sequence: CTT
ttttcttttttttcccaatg

SEQ ID NO: 14263 - DNA, 20 bp, Artificial Sequence
  Description of Artificial Sequence: Synthetic oligonucleotide
  Target: ANGPTL4; (-) strand; PAM type: YTN; PAM sequence: TTC
ttttttcttttttttcccaa

SEQ ID NO: 14264 - DNA, 20 bp, Artificial Sequence
  Description of Artificial Sequence: Synthetic oligonucleotide
  Target: ANGPTL4; (-) strand; PAM type: YTN; PAM sequence: TTT
cttttttcttttttttccca

SEQ ID NO: 14265 - DNA, 20 bp, Artificial Sequence
  Description of Artificial Sequence: Synthetic oligonucleotide
  Target: ANGPTL4; (-) strand; PAM type: YTN; PAM sequence: CTT
tcttttttcttttttttccc

SEQ ID NO: 14266 - DNA, 20 bp, Artificial Sequence
  Description of Artificial Sequence: Synthetic oligonucleotide
  Target: ANGPTL4; (-) strand; PAM type: YTN; PAM sequence: CTG
aggccaggcaagggagtctt

SEQ ID NO: 14267 - DNA, 20 bp, Artificial Sequence
  Description of Artificial Sequence: Synthetic oligonucleotide
  Target: ANGPTL4; (-) strand; PAM type: YTN; PAM sequence: CTC
catccgctgaggccaggcaa

SEQ ID NO: 14268 - DNA, 20 bp, Artificial Sequence
  Description of Artificial Sequence: Synthetic oligonucleotide
  Target: ANGPTL4; (-) strand; PAM type: YTN; PAM sequence: TTC
caaatctccatccgctgagg

SEQ ID NO: 14269 - DNA, 20 bp, Artificial Sequence
  Description of Artificial Sequence: Synthetic oligonucleotide
  Target: ANGPTL4; (-) strand; PAM type: YTN; PAM sequence: CTT
ccaaatctccatccgctgag

SEQ ID NO: 14270 - DNA, 20 bp, Artificial Sequence
  Description of Artificial Sequence: Synthetic oligonucleotide
  Target: ANGPTL4; (-) strand; PAM type: YTN; PAM sequence: CTC
atccatccttccaaatctcc

SEQ ID NO: 14271 - DNA, 20 bp, Artificial Sequence
  Description of Artificial Sequence: Synthetic oligonucleotide
  Target: ANGPTL4; (-) strand; PAM type: YTN; PAM sequence: TTC
atccactcatccatccttcc

SEQ ID NO: 14272 - DNA, 20 bp, Artificial Sequence
  Description of Artificial Sequence: Synthetic oligonucleotide
  Target: ANGPTL4; (-) strand; PAM type: YTN; PAM sequence: TTA
attcatccactcatccatcc

SEQ ID NO: 14273 - DNA, 20 bp, Artificial Sequence
  Description of Artificial Sequence: Synthetic oligonucleotide
  Target: ANGPTL4; (-) strand; PAM type: YTN; PAM sequence: CTT
aattcatccactcatccatc

SEQ ID NO: 14274 - DNA, 20 bp, Artificial Sequence
  Description of Artificial Sequence: Synthetic oligonucleotide
  Target: ANGPTL4; (-) strand; PAM type: YTN; PAM sequence: CTC
ttaattcatccactcatcca

SEQ ID NO: 14275 - DNA, 20 bp, Artificial Sequence
  Description of Artificial Sequence: Synthetic oligonucleotide
  Target: ANGPTL4; (-) strand; PAM type: YTN; PAM sequence: CTA
ccccaacctcttaattcatc

SEQ ID NO: 14276 - DNA, 20 bp, Artificial Sequence
  Description of Artificial Sequence: Synthetic oligonucleotide
  Target: ANGPTL4; (-) strand; PAM type: YTN; PAM sequence: TTG
cctaccccaacctcttaatt

SEQ ID NO: 14277 - DNA, 20 bp, Artificial Sequence
  Description of Artificial Sequence: Synthetic oligonucleotide
  Target: ANGPTL4; (-) strand; PAM type: YTN; PAM sequence: CTT
gcctaccccaacctcttaat

SEQ ID NO: 14278 - DNA, 20 bp, Artificial Sequence
  Description of Artificial Sequence: Synthetic oligonucleotide
  Target: ANGPTL4; (-) strand; PAM type: YTN; PAM sequence: TTG
gtgaggacccagcttgccta

SEQ ID NO: 14279 - DNA, 20 bp, Artificial Sequence
  Description of Artificial Sequence: Synthetic oligonucleotide
  Target: ANGPTL4; (-) strand; PAM type: YTN; PAM sequence: CTT
ggtgaggacccagcttgcct

SEQ ID NO: 14280 - DNA, 20 bp, Artificial Sequence
  Description of Artificial Sequence: Synthetic oligonucleotide
  Target: ANGPTL4; (-) strand; PAM type: YTN; PAM sequence: CTG
gggaggggtgaaaaccttgg

SEQ ID NO: 14281 - DNA, 20 bp, Artificial Sequence
  Description of Artificial Sequence: Synthetic oligonucleotide
  Target: ANGPTL4; (-) strand; PAM type: YTN; PAM sequence: TTG
tgtctggggaggggtgaaaa

SEQ ID NO: 14282 - DNA, 20 bp, Artificial Sequence
  Description of Artificial Sequence: Synthetic oligonucleotide
  Target: ANGPTL4; (-) strand; PAM type: YTN; PAM sequence: TTG
agttgtgtctggggaggggt

SEQ ID NO: 14283 - DNA, 20 bp, Artificial Sequence
  Description of Artificial Sequence: Synthetic oligonucleotide
  Target: ANGPTL4; (-) strand; PAM type: YTN; PAM sequence: CTT
gagttgtgtctggggagggg

SEQ ID NO: 14284 - DNA, 20 bp, Artificial Sequence
  Description of Artificial Sequence: Synthetic oligonucleotide
  Target: ANGPTL4; (-) strand; PAM type: YTN; PAM sequence: CTG
agccttgagttgtgtctggg

SEQ ID NO: 14285 - DNA, 20 bp, Artificial Sequence
  Description of Artificial Sequence: Synthetic oligonucleotide
  Target: ANGPTL4; (-) strand; PAM type: YTN; PAM sequence: TTC
tgagccttgagttgtgtctg

SEQ ID NO: 14286 - DNA, 20 bp, Artificial Sequence
  Description of Artificial Sequence: Synthetic oligonucleotide
  Target: ANGPTL4; (-) strand; PAM type: YTN; PAM sequence: CTG
ttctgagccttgagttgtgt

SEQ ID NO: 14287 - DNA, 20 bp, Artificial Sequence
  Description of Artificial Sequence: Synthetic oligonucleotide
  Target: ANGPTL4; (-) strand; PAM type: YTN; PAM sequence: CTG
ctgttctgagccttgagttg

SEQ ID NO: 14288 - DNA, 20 bp, Artificial Sequence
  Description of Artificial Sequence: Synthetic oligonucleotide
  Target: ANGPTL4; (-) strand; PAM type: YTN; PAM sequence: CTG
gatcctgctgttctgagcct

SEQ ID NO: 14289 - DNA, 20 bp, Artificial Sequence
  Description of Artificial Sequence: Synthetic oligonucleotide
  Target: ANGPTL4; (-) strand; PAM type: YTN; PAM sequence: TTG
ctggatcctgctgttctgag

SEQ ID NO: 14290 - DNA, 20 bp, Artificial Sequence
  Description of Artificial Sequence: Synthetic oligonucleotide
  Target: ANGPTL4; (-) strand; PAM type: YTN; PAM sequence: TTG
tggaagagttgctggatcct

SEQ ID NO: 14291 - DNA, 20 bp, Artificial Sequence
  Description of Artificial Sequence: Synthetic oligonucleotide
  Target: ANGPTL4; (-) strand; PAM type: YTN; PAM sequence: CTT
gtggaagagttgctggatcc

SEQ ID NO: 14292 - DNA, 20 bp, Artificial Sequence
  Description of Artificial Sequence: Synthetic oligonucleotide
  Target: ANGPTL4; (-) strand; PAM type: YTN; PAM sequence: CTG
ggccaccttgtggaagagtt

SEQ ID NO: 14293 - DNA, 20 bp, Artificial Sequence
  Description of Artificial Sequence: Synthetic oligonucleotide
  Target: ANGPTL4; (-) strand; PAM type: YTN; PAM sequence: CTG
ctgggccaccttgtggaaga

SEQ ID NO: 14294 - DNA, 20 bp, Artificial Sequence
  Description of Artificial Sequence: Synthetic oligonucleotide
  Target: ANGPTL4; (-) strand; PAM type: YTN; PAM sequence: CTG
ctgctgggccaccttgtgga

SEQ ID NO: 14295 - DNA, 20 bp, Artificial Sequence
  Description of Artificial Sequence: Synthetic oligonucleotide
  Target: ANGPTL4; (-) strand; PAM type: YTN; PAM sequence: CTC
caggtgccgctgctgctggg

SEQ ID NO: 14296 - DNA, 20 bp, Artificial Sequence
  Description of Artificial Sequence: Synthetic oligonucleotide
  Target: ANGPTL4; (-) strand; PAM type: YTN; PAM sequence: TTC
tccaggtgccgctgctgctg

SEQ ID NO: 14297 - DNA, 20 bp, Artificial Sequence
  Description of Artificial Sequence: Synthetic oligonucleotide
  Target: ANGPTL4; (-) strand; PAM type: YTN; PAM sequence: CTT
ctccaggtgccgctgctgct

SEQ ID NO: 14298 - DNA, 20 bp, Artificial Sequence
  Description of Artificial Sequence: Synthetic oligonucleotide
  Target: ANGPTL4; (-) strand; PAM type: YTN; PAM sequence: CTG
cttctccaggtgccgctgct

SEQ ID NO: 14299 - DNA, 20 bp, Artificial Sequence
  Description of Artificial Sequence: Synthetic oligonucleotide
  Target: ANGPTL4; (-) strand; PAM type: YTN; PAM sequence: TTC
gcaggtgctgcttctccagg

SEQ ID NO: 14300 - DNA, 20 bp, Artificial Sequence
  Description of Artificial Sequence: Synthetic oligonucleotide
  Target: ANGPTL4; (-) strand; PAM type: YTN; PAM sequence: CTG
aattcgcaggtgctgcttct

SEQ ID NO: 14301 - DNA, 20 bp, Artificial Sequence
  Description of Artificial Sequence: Synthetic oligonucleotide
  Target: ANGPTL4; (-) strand; PAM type: YTN; PAM sequence: TTG
cagatgctgaattcgcaggt

SEQ ID NO: 14302 - DNA, 20 bp, Artificial Sequence
  Description of Artificial Sequence: Synthetic oligonucleotide
  Target: ANGPTL4; (-) strand; PAM type: YTN; PAM sequence: TTT
gcagatgctgaattcgcagg

SEQ ID NO: 14303 - DNA, 20 bp, Artificial Sequence
  Description of Artificial Sequence: Synthetic oligonucleotide
  Target: ANGPTL4; (-) strand; PAM type: YTN; PAM sequence: CTT
tgcagatgctgaattcgcag

SEQ ID NO: 14304 - DNA, 20 bp, Artificial Sequence
  Description of Artificial Sequence: Synthetic oligonucleotide
  Target: ANGPTL4; (-) strand; PAM type: YTN; PAM sequence: CTG
gctttgcagatgctgaattc

SEQ ID NO: 14305 - DNA, 20 bp, Artificial Sequence
  Description of Artificial Sequence: Synthetic oligonucleotide
  Target: ANGPTL4; (-) strand; PAM type: YTN; PAM sequence: TTA
cctggctttgcagatgctga

SEQ ID NO: 14306 - DNA, 20 bp, Artificial Sequence
  Description of Artificial Sequence: Synthetic oligonucleotide
  Target: ANGPTL4; (-) strand; PAM type: YTN; PAM sequence: CTA
gggttacctggctttgcaga

SEQ ID NO: 14307 - DNA, 20 bp, Artificial Sequence
  Description of Artificial Sequence: Synthetic oligonucleotide
  Target: ANGPTL4; (-) strand; PAM type: YTN; PAM sequence: TTG
atcctagggttacctggctt

SEQ ID NO: 14308 - DNA, 20 bp, Artificial Sequence
  Description of Artificial Sequence: Synthetic oligonucleotide
  Target: ANGPTL4; (-) strand; PAM type: YTN; PAM sequence: CTT
gatcctagggttacctggct

SEQ ID NO: 14309 - DNA, 20 bp, Artificial Sequence
  Description of Artificial Sequence: Synthetic oligonucleotide
  Target: ANGPTL4; (-) strand; PAM type: YTN; PAM sequence: CTC
ccttgatcctagggttacct

SEQ ID NO: 14310 - DNA, 20 bp, Artificial Sequence
  Description of Artificial Sequence: Synthetic oligonucleotide
  Target: ANGPTL4; (-) strand; PAM type: YTN; PAM sequence: TTC
tcccttgatcctagggttac

SEQ ID NO: 14311 - DNA, 20 bp, Artificial Sequence
  Description of Artificial Sequence: Synthetic oligonucleotide
  Target: ANGPTL4; (-) strand; PAM type: YTN; PAM sequence: TTT
ctcccttgatcctagggtta

SEQ ID NO: 14312 - DNA, 20 bp, Artificial Sequence
  Description of Artificial Sequence: Synthetic oligonucleotide
  Target: ANGPTL4; (-) strand; PAM type: YTN; PAM sequence: TTT
tctcccttgatcctagggtt

SEQ ID NO: 14313 - DNA, 20 bp, Artificial Sequence
  Description of Artificial Sequence: Synthetic oligonucleotide
  Target: ANGPTL4; (-) strand; PAM type: YTN; PAM sequence: CTT
ttctcccttgatcctagggt

SEQ ID NO: 14314 - DNA, 20 bp, Artificial Sequence
  Description of Artificial Sequence: Synthetic oligonucleotide
  Target: ANGPTL4; (-) strand; PAM type: YTN; PAM sequence: CTA
tcagagggaccttttctccc

SEQ ID NO: 14315 - DNA, 20 bp, Artificial Sequence
  Description of Artificial Sequence: Synthetic oligonucleotide
  Target: ANGPTL4; (-) strand; PAM type: YTN; PAM sequence: CTG
gggtccagctatcagaggga

SEQ ID NO: 14316 - DNA, 20 bp, Artificial Sequence
  Description of Artificial Sequence: Synthetic oligonucleotide
  Target: ANGPTL4; (-) strand; PAM type: YTN; PAM sequence: CTC
aacctggggtccagctatca

SEQ ID NO: 14317 - DNA, 20 bp, Artificial Sequence
  Description of Artificial Sequence: Synthetic oligonucleotide
  Target: ANGPTL4; (-) strand; PAM type: YTN; PAM sequence: CTC
tcaacctggggtccagctat

SEQ ID NO: 14318 - DNA, 20 bp, Artificial Sequence
  Description of Artificial Sequence: Synthetic oligonucleotide
  Target: ANGPTL4; (-) strand; PAM type: YTN; PAM sequence: CTC
cctctcaacctggggtccag

SEQ ID NO: 14319 - DNA, 20 bp, Artificial Sequence
  Description of Artificial Sequence: Synthetic oligonucleotide
  Target: ANGPTL4; (-) strand; PAM type: YTN; PAM sequence: CTC
accacctccctctcaacctg

SEQ ID NO: 14320 - DNA, 20 bp, Artificial Sequence
  Description of Artificial Sequence: Synthetic oligonucleotide
  Target: ANGPTL4; (-) strand; PAM type: YTN; PAM sequence: TTC
tcaccacctccctctcaacc

SEQ ID NO: 14321 - DNA, 20 bp, Artificial Sequence
  Description of Artificial Sequence: Synthetic oligonucleotide
  Target: ANGPTL4; (-) strand; PAM type: YTN; PAM sequence: CTG
gccccacgtccccagccaca

SEQ ID NO: 14322 - DNA, 20 bp, Artificial Sequence
  Description of Artificial Sequence: Synthetic oligonucleotide
  Target: ANGPTL4; (-) strand; PAM type: YTN; PAM sequence: CTG
cctggccccacgtccccagc

SEQ ID NO: 14323 - DNA, 20 bp, Artificial Sequence
  Description of Artificial Sequence: Synthetic oligonucleotide
  Target: ANGPTL4; (-) strand; PAM type: YTN; PAM sequence: CTA
ggatgggacgggaggagggt

SEQ ID NO: 14324 - DNA, 20 bp, Artificial Sequence
  Description of Artificial Sequence: Synthetic oligonucleotide
  Target: ANGPTL4; (-) strand; PAM type: YTN; PAM sequence: TTG
tggtccaggaggccaaacta

SEQ ID NO: 14325 - DNA, 20 bp, Artificial Sequence
  Description of Artificial Sequence: Synthetic oligonucleotide
  Target: ANGPTL4; (-) strand; PAM type: YTN; PAM sequence: CTT
gtggtccaggaggccaaact

SEQ ID NO: 14326 - DNA, 20 bp, Artificial Sequence
  Description of Artificial Sequence: Synthetic oligonucleotide
  Target: ANGPTL4; (-) strand; PAM type: YTN; PAM sequence: CTA
ggtgcttgtggtccaggagg

SEQ ID NO: 14327 - DNA, 20 bp, Artificial Sequence
  Description of Artificial Sequence: Synthetic oligonucleotide
  Target: ANGPTL4; (-) strand; PAM type: YTN; PAM sequence: CTC
atggtctaggtgcttgtggt

SEQ ID NO: 14328 - DNA, 20 bp, Artificial Sequence
  Description of Artificial Sequence: Synthetic oligonucleotide
  Target: ANGPTL4; (-) strand; PAM type: YTN; PAM sequence: TTG
gccacctcatggtctaggtg

SEQ ID NO: 14329 - DNA, 20 bp, Artificial Sequence
  Description of Artificial Sequence: Synthetic oligonucleotide
  Target: ANGPTL4; (-) strand; PAM type: YTN; PAM sequence: CTT
ggccacctcatggtctaggt

SEQ ID NO: 14330 - DNA, 20 bp, Artificial Sequence
  Description of Artificial Sequence: Synthetic oligonucleotide
  Target: ANGPTL4; (-) strand; PAM type: YTN; PAM sequence: TTC
gggcaggcttggccacctca

SEQ ID NO: 14331 - DNA, 20 bp, Artificial Sequence
  Description of Artificial Sequence: Synthetic oligonucleotide
  Target: ANGPTL4; (-) strand; PAM type: YTN; PAM sequence: CTT
cgggcaggcttggccacctc

SEQ ID NO: 14332 - DNA, 20 bp, Artificial Sequence
  Description of Artificial Sequence: Synthetic oligonucleotide
  Target: ANGPTL4; (-) strand; PAM type: YTN; PAM sequence: TTC
ttcgggcaggcttggccacc

SEQ ID NO: 14333 - DNA, 20 bp, Artificial Sequence
  Description of Artificial Sequence: Synthetic oligonucleotide
  Target: ANGPTL4; (-) strand; PAM type: YTN; PAM sequence: TTT
cttcgggcaggcttggccac

SEQ ID NO: 14334 - DNA, 20 bp, Artificial Sequence
  Description of Artificial Sequence: Synthetic oligonucleotide
  Target: ANGPTL4; (-) strand; PAM type: YTN; PAM sequence: CTT
tcttcgggcaggcttggcca

SEQ ID NO: 14335 - DNA, 20 bp, Artificial Sequence
  Description of Artificial Sequence: Synthetic oligonucleotide
  Target: ANGPTL4; (-) strand; PAM type: YTN; PAM sequence: CTC
tttcttcgggcaggcttggc

SEQ ID NO: 14336 - DNA, 20 bp, Artificial Sequence
  Description of Artificial Sequence: Synthetic oligonucleotide
  Target: ANGPTL4; (-) strand; PAM type: YTN; PAM sequence: CTC
gggcagcctctttcttcggg

SEQ ID NO: 14337 - DNA, 20 bp, Artificial Sequence
  Description of Artificial Sequence: Synthetic oligonucleotide
  Target: ANGPTL4; (-) strand; PAM type: YTN; PAM sequence: CTG
ggccatctcgggcagcctct

SEQ ID NO: 14338 - DNA, 20 bp, Artificial Sequence
  Description of Artificial Sequence: Synthetic oligonucleotide
  Target: ANGPTL4; (-) strand; PAM type: YTN; PAM sequence: CTG
gctgggccatctcgggcagc

SEQ ID NO: 14339 - DNA, 20 bp, Artificial Sequence
  Description of Artificial Sequence: Synthetic oligonucleotide
  Target: ANGPTL4; (-) strand; PAM type: YTN; PAM sequence: TTG
tgagccgggtcaactggctg

SEQ ID NO: 14340 - DNA, 20 bp, Artificial Sequence
  Description of Artificial Sequence: Synthetic oligonucleotide
  Target: ANGPTL4; (-) strand; PAM type: YTN; PAM sequence: CTG
acattgtgagccgggtcaac

SEQ ID NO: 14341 - DNA, 20 bp, Artificial Sequence
  Description of Artificial Sequence: Synthetic oligonucleotide
  Target: ANGPTL4; (-) strand; PAM type: YTN; PAM sequence: CTC
acggtgcaggcggctgacat

SEQ ID NO: 14342 - DNA, 20 bp, Artificial Sequence
  Description of Artificial Sequence: Synthetic oligonucleotide
  Target: ANGPTL4; (-) strand; PAM type: YTN; PAM sequence: CTG
acaaggagaggaccagcaat

SEQ ID NO: 14343 - DNA, 20 bp, Artificial Sequence
  Description of Artificial Sequence: Synthetic oligonucleotide
  Target: ANGPTL4; (-) strand; PAM type: YTN; PAM sequence: TTA
aggtggacctgacaaggaga

SEQ ID NO: 14344 - DNA, 20 bp, Artificial Sequence
  Description of Artificial Sequence: Synthetic oligonucleotide
  Target: ANGPTL4; (-) strand; PAM type: YTN; PAM sequence: CTT
aaggtggacctgacaaggag

SEQ ID NO: 14345 - DNA, 20 bp, Artificial Sequence
  Description of Artificial Sequence: Synthetic oligonucleotide
  Target: ANGPTL4; (-) strand; PAM type: YTN; PAM sequence: CTC
cttaaggtggacctgacaag

SEQ ID NO: 14346 - DNA, 20 bp, Artificial Sequence
  Description of Artificial Sequence: Synthetic oligonucleotide
  Target: ANGPTL4; (-) strand; PAM type: YTN; PAM sequence: TTC
tccttaaggtggacctgaca

SEQ ID NO: 14347 - DNA, 20 bp, Artificial Sequence
  Description of Artificial Sequence: Synthetic oligonucleotide
  Target: ANGPTL4; (-) strand; PAM type: YTN; PAM sequence: CTT
ctccttaaggtggacctgac

SEQ ID NO: 14348 - DNA, 20 bp, Artificial Sequence
  Description of Artificial Sequence: Synthetic oligonucleotide
  Target: ANGPTL4; (-) strand; PAM type: YTN; PAM sequence: CTC
caggccaggacatcttctcc

SEQ ID NO: 14349 - DNA, 20 bp, Artificial Sequence
  Description of Artificial Sequence: Synthetic oligonucleotide
  Target: ANGPTL4; (-) strand; PAM type: YTN; PAM sequence: CTC
agggactccaggccaggaca

SEQ ID NO: 14350 - DNA, 20 bp, Artificial Sequence
  Description of Artificial Sequence: Synthetic oligonucleotide
  Target: ANGPTL4; (-) strand; PAM type: YTN; PAM sequence: CTG
gtgagccctcagggactcca

SEQ ID NO: 14351 - DNA, 20 bp, Artificial Sequence
  Description of Artificial Sequence: Synthetic oligonucleotide
  Target: ANGPTL4; (-) strand; PAM type: YTN; PAM sequence: TTG
acccagagactggtgagccc

SEQ ID NO: 14352 - DNA, 20 bp, Artificial Sequence
  Description of Artificial Sequence: Synthetic oligonucleotide
  Target: ANGPTL4; (-) strand; PAM type: YTN; PAM sequence: TTT
gacccagagactggtgagcc

SEQ ID NO: 14353 - DNA, 20 bp, Artificial Sequence
  Description of Artificial Sequence: Synthetic oligonucleotide
  Target: ANGPTL4; (-) strand; PAM type: YTN; PAM sequence: CTT
tgacccagagactggtgagc

SEQ ID NO: 14354 - DNA, 20 bp, Artificial Sequence
  Description of Artificial Sequence: Synthetic oligonucleotide
  Target: ANGPTL4; (-) strand; PAM type: YTN; PAM sequence: CTC
ccatcagctttgacccagag

SEQ ID NO: 14355 - DNA, 20 bp, Artificial Sequence
  Description of Artificial Sequence: Synthetic oligonucleotide
  Target: ANGPTL4; (-) strand; PAM type: YTN; PAM sequence: CTG
aggaaggaggtgctcccatc

SEQ ID NO: 14356 - DNA, 20 bp, Artificial Sequence
  Description of Artificial Sequence: Synthetic oligonucleotide
  Target: ANGPTL4; (-) strand; PAM type: YTN; PAM sequence: CTG
ggccaggtcagggctgagga

SEQ ID NO: 14357 - DNA, 20 bp, Artificial Sequence
  Description of Artificial Sequence: Synthetic oligonucleotide
  Target: ANGPTL4; (-) strand; PAM type: YTN; PAM sequence: CTG
gctgggccaggtcagggctg

SEQ ID NO: 14358 - DNA, 20 bp, Artificial Sequence
  Description of Artificial Sequence: Synthetic oligonucleotide
  Target: ANGPTL4; (-) strand; PAM type: YTN; PAM sequence: TTG
ggtggcctggctgggccagg

SEQ ID NO: 14359 - DNA, 20 bp, Artificial Sequence
  Description of Artificial Sequence: Synthetic oligonucleotide
  Target: ANGPTL4; (-) strand; PAM type: YTN; PAM sequence: TTG
cagaggagaagggttgggtg

SEQ ID NO: 14360 - DNA, 20 bp, Artificial Sequence
  Description of Artificial Sequence: Synthetic oligonucleotide
  Target: ANGPTL4; (-) strand; PAM type: YTN; PAM sequence: CTT
gcagaggagaagggttgggt

SEQ ID NO: 14361 - DNA, 20 bp, Artificial Sequence
  Description of Artificial Sequence: Synthetic oligonucleotide
  Target: ANGPTL4; (-) strand; PAM type: YTN; PAM sequence: CTG
gcttgcagaggagaagggtt

SEQ ID NO: 14362 - DNA, 20 bp, Artificial Sequence
  Description of Artificial Sequence: Synthetic oligonucleotide
  Target: ANGPTL4; (-) strand; PAM type: YTN; PAM sequence: TTC
agggacagcccactggcttg

SEQ ID NO: 14363 - DNA, 20 bp, Artificial Sequence
  Description of Artificial Sequence: Synthetic oligonucleotide
  Target: ANGPTL4; (-) strand; PAM type: YTN; PAM sequence: CTT
cagggacagcccactggctt

SEQ ID NO: 14364 - DNA, 20 bp, Artificial Sequence
  Description of Artificial Sequence: Synthetic oligonucleotide
  Target: ANGPTL4; (-) strand; PAM type: YTN; PAM sequence: TTC
caatcagtgatcagcagggc

SEQ ID NO: 14365 - DNA, 20 bp, Artificial Sequence
  Description of Artificial Sequence: Synthetic oligonucleotide
  Target: ANGPTL4; (-) strand; PAM type: YTN; PAM sequence: CTG
ttccaatcagtgatcagcag

SEQ ID NO: 14366 - DNA, 20 bp, Artificial Sequence
  Description of Artificial Sequence: Synthetic oligonucleotide
  Target: ANGPTL4; (-) strand; PAM type: YTN; PAM sequence: CTC
tgttccaatcagtgatcagc

SEQ ID NO: 14367 - DNA, 20 bp, Artificial Sequence
  Description of Artificial Sequence: Synthetic oligonucleotide
  Target: ANGPTL4; (-) strand; PAM type: YTN; PAM sequence: CTC
cacctctgttccaatcagtg

SEQ ID NO: 14368 - DNA, 20 bp, Artificial Sequence
  Description of Artificial Sequence: Synthetic oligonucleotide
  Target: ANGPTL4; (-) strand; PAM type: YTN; PAM sequence: TTC
tccacctctgttccaatcag

SEQ ID NO: 14369 - DNA, 20 bp, Artificial Sequence
  Description of Artificial Sequence: Synthetic oligonucleotide
  Target: ANGPTL4; (-) strand; PAM type: YTN; PAM sequence: TTT
ctccacctctgttccaatca

SEQ ID NO: 14370 - DNA, 20 bp, Artificial Sequence
  Description of Artificial Sequence: Synthetic oligonucleotide
  Target: ANGPTL4; (-) strand; PAM type: YTN; PAM sequence: CTT
tctccacctctgttccaatc

SEQ ID NO: 14371 - DNA, 20 bp, Artificial Sequence
  Description of Artificial Sequence: Synthetic oligonucleotide
  Target: ANGPTL4; (-) strand; PAM type: YTN; PAM sequence: CTC
tttctccacctctgttccaa

SEQ ID NO: 14372 - DNA, 20 bp, Artificial Sequence
  Description of Artificial Sequence: Synthetic oligonucleotide
  Target: ANGPTL4; (-) strand; PAM type: YTN; PAM sequence: CTC
aagacctctttctccacctc

SEQ ID NO: 14373 - DNA, 20 bp, Artificial Sequence
  Description of Artificial Sequence: Synthetic oligonucleotide
  Target: ANGPTL4; (-) strand; PAM type: YTN; PAM sequence: CTC
aagtccctcaagacctcttt

SEQ ID NO: 14374 - DNA, 20 bp, Artificial Sequence
  Description of Artificial Sequence: Synthetic oligonucleotide
  Target: ANGPTL4; (-) strand; PAM type: YTN; PAM sequence: CTG
cagctcaagtccctcaagac

SEQ ID NO: 14375 - DNA, 20 bp, Artificial Sequence
  Description of Artificial Sequence: Synthetic oligonucleotide
  Target: ANGPTL4; (-) strand; PAM type: YTN; PAM sequence: CTC
cagcacccctgcagctcaag

SEQ ID NO: 14376 - DNA, 20 bp, Artificial Sequence
  Description of Artificial Sequence: Synthetic oligonucleotide
  Target: ANGPTL4; (-) strand; PAM type: YTN; PAM sequence: TTC
tccagcacccctgcagctca

SEQ ID NO: 14377 - DNA, 20 bp, Artificial Sequence
  Description of Artificial Sequence: Synthetic oligonucleotide
  Target: ANGPTL4; (-) strand; PAM type: YTN; PAM sequence: CTT
ctccagcacccctgcagctc

SEQ ID NO: 14378 - DNA, 20 bp, Artificial Sequence
  Description of Artificial Sequence: Synthetic oligonucleotide
  Target: ANGPTL4; (-) strand; PAM type: YTN; PAM sequence: CTA
ccttctccagcacccctgca

SEQ ID NO: 14379 - DNA, 20 bp, Artificial Sequence
  Description of Artificial Sequence: Synthetic oligonucleotide
  Target: ANGPTL4; (-) strand; PAM type: YTN; PAM sequence: TTC
taccttctccagcacccctg

SEQ ID NO: 14380 - DNA, 20 bp, Artificial Sequence
  Description of Artificial Sequence: Synthetic oligonucleotide
  Target: ANGPTL4; (-) strand; PAM type: YTN; PAM sequence: TTT
ctaccttctccagcacccct

SEQ ID NO: 14381 - DNA, 20 bp, Artificial Sequence
  Description of Artificial Sequence: Synthetic oligonucleotide
  Target: ANGPTL4; (-) strand; PAM type: YTN; PAM sequence: TTC
aggatggcaccccgaacccc

SEQ ID NO: 14382 - DNA, 20 bp, Artificial Sequence
  Description of Artificial Sequence: Synthetic oligonucleotide
  Target: ANGPTL4; (-) strand; PAM type: YTN; PAM sequence: CTT
caggatggcaccccgaaccc

SEQ ID NO: 14383 - DNA, 20 bp, Artificial Sequence
  Description of Artificial Sequence: Synthetic oligonucleotide
  Target: ANGPTL4; (-) strand; PAM type: YTN; PAM sequence: CTA
accttcaggatggcaccccg

SEQ ID NO: 14384 - DNA, 20 bp, Artificial Sequence
  Description of Artificial Sequence: Synthetic oligonucleotide
  Target: ANGPTL4; (-) strand; PAM type: YTN; PAM sequence: TTC
taaccttcaggatggcaccc

SEQ ID NO: 14385 - DNA, 20 bp, Artificial Sequence
  Description of Artificial Sequence: Synthetic oligonucleotide
  Target: ANGPTL4; (-) strand; PAM type: YTN; PAM sequence: CTA
gaaggttctaaccttcagga

SEQ ID NO: 14386 - DNA, 20 bp, Artificial Sequence
  Description of Artificial Sequence: Synthetic oligonucleotide
  Target: ANGPTL4; (-) strand; PAM type: YTN; PAM sequence: CTC
ccctagaaggttctaacctt

SEQ ID NO: 14387 - DNA, 20 bp, Artificial Sequence
  Description of Artificial Sequence: Synthetic oligonucleotide
  Target: ANGPTL4; (-) strand; PAM type: YTN; PAM sequence: CTC
catgacaccctcccctagaa

SEQ ID NO: 14388 - DNA, 20 bp, Artificial Sequence
  Description of Artificial Sequence: Synthetic oligonucleotide
  Target: ANGPTL4; (-) strand; PAM type: YTN; PAM sequence: CTC
ctccatgacaccctccccta

SEQ ID NO: 14389 - DNA, 20 bp, Artificial Sequence
  Description of Artificial Sequence: Synthetic oligonucleotide
  Target: ANGPTL4; (-) strand; PAM type: YTN; PAM sequence: CTG
gcaccccctcctccatgaca

SEQ ID NO: 14390 - DNA, 20 bp, Artificial Sequence
  Description of Artificial Sequence: Synthetic oligonucleotide
  Target: ANGPTL4; (-) strand; PAM type: YTN; PAM sequence: CTA
cctggcaccccctcctccat

SEQ ID NO: 14391 - DNA, 20 bp, Artificial Sequence
  Description of Artificial Sequence: Synthetic oligonucleotide
  Target: ANGPTL4; (-) strand; PAM type: YTN; PAM sequence: CTA
ctacctggcaccccctcctc

SEQ ID NO: 14392 - DNA, 20 bp, Artificial Sequence
  Description of Artificial Sequence: Synthetic oligonucleotide
  Target: ANGPTL4; (-) strand; PAM type: YTN; PAM sequence: CTA
caaacactactacctggcac

SEQ ID NO: 14393 - DNA, 20 bp, Artificial Sequence
  Description of Artificial Sequence: Synthetic oligonucleotide
  Target: ANGPTL4; (-) strand; PAM type: YTN; PAM sequence: TTG
tggagggcccaaatctacaa

SEQ ID NO: 14394 - DNA, 20 bp, Artificial Sequence
  Description of Artificial Sequence: Synthetic oligonucleotide
  Target: ANGPTL4; (-) strand; PAM type: YTN; PAM sequence: TTC
ccacataccccaagacattg

SEQ ID NO: 14395 - DNA, 20 bp, Artificial Sequence
  Description of Artificial Sequence: Synthetic oligonucleotide
  Target: ANGPTL4; (-) strand; PAM type: YTN; PAM sequence: CTA
attcccacataccccaagac

SEQ ID NO: 14396 - DNA, 20 bp, Artificial Sequence
  Description of Artificial Sequence: Synthetic oligonucleotide
  Target: ANGPTL4; (-) strand; PAM type: YTN; PAM sequence: TTC
ccagccctaattcccacata

SEQ ID NO: 14397 - DNA, 20 bp, Artificial Sequence
  Description of Artificial Sequence: Synthetic oligonucleotide
  Target: ANGPTL4; (-) strand; PAM type: YTN; PAM sequence: CTG
ggggttcccagccctaattc

SEQ ID NO: 14398 - DNA, 20 bp, Artificial Sequence
  Description of Artificial Sequence: Synthetic oligonucleotide
  Target: ANGPTL4; (-) strand; PAM type: YTN; PAM sequence: CTG
ggagctgggggttcccagcc

SEQ ID NO: 14399 - DNA, 20 bp, Artificial Sequence
  Description of Artificial Sequence: Synthetic oligonucleotide
  Target: ANGPTL4; (-) strand; PAM type: YTN; PAM sequence: CTG
gtctgggagctgggggttcc

SEQ ID NO: 14400 - DNA, 20 bp, Artificial Sequence
  Description of Artificial Sequence: Synthetic oligonucleotide
  Target: ANGPTL4; (-) strand; PAM type: YTN; PAM sequence: TTC
tggtctgggagctgggggtt

SEQ ID NO: 14401 - DNA, 20 bp, Artificial Sequence
  Description of Artificial Sequence: Synthetic oligonucleotide
  Target: ANGPTL4; (-) strand; PAM type: YTN; PAM sequence: TTT
ctggtctgggagctgggggt

SEQ ID NO: 14402 - DNA, 20 bp, Artificial Sequence
  Description of Artificial Sequence: Synthetic oligonucleotide
  Target: ANGPTL4; (-) strand; PAM type: YTN; PAM sequence: TTG
taagatacaagagtgtttct

SEQ ID NO: 14403 - DNA, 20 bp, Artificial Sequence
  Description of Artificial Sequence: Synthetic oligonucleotide
  Target: ANGPTL4; (-) strand; PAM type: YTN; PAM sequence: TTT
gtaagatacaagagtgtttc

SEQ ID NO: 14404 - DNA, 20 bp, Artificial Sequence
  Description of Artificial Sequence: Synthetic oligonucleotide
  Target: ANGPTL4; (-) strand; PAM type: YTN; PAM sequence: TTG
gatttgtaagatacaagagt

SEQ ID NO: 14405 - DNA, 20 bp, Artificial Sequence
  Description of Artificial Sequence: Synthetic oligonucleotide
  Target: ANGPTL4; (-) strand; PAM type: YTN; PAM sequence: CTG
gagcattggatttgtaagat

SEQ ID NO: 14406 - DNA, 20 bp, Artificial Sequence
  Description of Artificial Sequence: Synthetic oligonucleotide
  Target: ANGPTL4; (-) strand; PAM type: YTN; PAM sequence: CTG
cggtggggagggggccggcg

SEQ ID NO: 14407 - DNA, 20 bp, Artificial Sequence
  Description of Artificial Sequence: Synthetic oligonucleotide
  Target: ANGPTL4; (-) strand; PAM type: YTN; PAM sequence: TTC
tgcggtggggagggggccgg

SEQ ID NO: 14408 - DNA, 20 bp, Artificial Sequence
  Description of Artificial Sequence: Synthetic oligonucleotide
  Target: ANGPTL4; (-) strand; PAM type: YTN; PAM sequence: TTT
ctgcggtggggagggggccg

SEQ ID NO: 14409 - DNA, 20 bp, Artificial Sequence
  Description of Artificial Sequence: Synthetic oligonucleotide
  Target: ANGPTL4; (-) strand; PAM type: YTN; PAM sequence: CTT
tctgcggtggggagggggcc

SEQ ID NO: 14410 - DNA, 20 bp, Artificial Sequence
  Description of Artificial Sequence: Synthetic oligonucleotide
  Target: ANGPTL4; (-) strand; PAM type: YTN; PAM sequence: TTG
tggtggcagcaaaagcccac

SEQ ID NO: 14411 - DNA, 20 bp, Artificial Sequence
  Description of Artificial Sequence: Synthetic oligonucleotide
  Target: ANGPTL4; (-) strand; PAM type: YTN; PAM sequence: CTT
gtggtggcagcaaaagccca

SEQ ID NO: 14412 - DNA, 20 bp, Artificial Sequence
  Description of Artificial Sequence: Synthetic oligonucleotide
  Target: ANGPTL4; (-) strand; PAM type: YTN; PAM sequence: CTA
caacttgtggtggcagcaaa

SEQ ID NO: 14413 - DNA, 20 bp, Artificial Sequence
  Description of Artificial Sequence: Synthetic oligonucleotide
  Target: ANGPTL4; (-) strand; PAM type: YTN; PAM sequence: TTG
ggaataaagcacctacaact

SEQ ID NO: 14414 - DNA, 20 bp, Artificial Sequence
  Description of Artificial Sequence: Synthetic oligonucleotide
  Target: ANGPTL4; (-) strand; PAM type: YTN; PAM sequence: TTT
gggaataaagcacctacaac

SEQ ID NO: 14415 - DNA, 20 bp, Artificial Sequence
  Description of Artificial Sequence: Synthetic oligonucleotide
  Target: ANGPTL4; (-) strand; PAM type: YTN; PAM sequence: TTC
gagatgaacggagatttggg

SEQ ID NO: 14416 - DNA, 20 bp, Artificial Sequence
  Description of Artificial Sequence: Synthetic oligonucleotide
  Target: ANGPTL4; (-) strand; PAM type: YTN; PAM sequence: CTG
tggttcgagatgaacggaga

SEQ ID NO: 14417 - DNA, 20 bp, Artificial Sequence
  Description of Artificial Sequence: Synthetic oligonucleotide
  Target: ANGPTL4; (-) strand; PAM type: YTN; PAM sequence: CTG
catcggacacacgtggacat

SEQ ID NO: 14418 - DNA, 20 bp, Artificial Sequence
  Description of Artificial Sequence: Synthetic oligonucleotide
  Target: ANGPTL4; (-) strand; PAM type: YTN; PAM sequence: TTA
gagaaccgcgagtctgcatc

SEQ ID NO: 14419 - DNA, 20 bp, Artificial Sequence
  Description of Artificial Sequence: Synthetic oligonucleotide
  Target: ANGPTL4; (-) strand; PAM type: YTN; PAM sequence: CTT
agagaaccgcgagtctgcat

SEQ ID NO: 14420 - DNA, 20 bp, Artificial Sequence
  Description of Artificial Sequence: Synthetic oligonucleotide
  Target: ANGPTL4; (-) strand; PAM type: YTN; PAM sequence: CTG
tggacagccacagatgcagg

SEQ ID NO: 14421 - DNA, 20 bp, Artificial Sequence
  Description of Artificial Sequence: Synthetic oligonucleotide
  Target: ANGPTL4; (-) strand; PAM type: YTN; PAM sequence: TTG
gctgtggacagccacagatg

SEQ ID NO: 14422 - DNA, 20 bp, Artificial Sequence
  Description of Artificial Sequence: Synthetic oligonucleotide
  Target: ANGPTL4; (-) strand; PAM type: YTN; PAM sequence: TTC
acccagttggctgtggacag

SEQ ID NO: 14423 - DNA, 20 bp, Artificial Sequence
  Description of Artificial Sequence: Synthetic oligonucleotide
  Target: ANGPTL4; (-) strand; PAM type: YTN; PAM sequence: TTT
cacccagttggctgtggaca

SEQ ID NO: 14424 - DNA, 20 bp, Artificial Sequence
  Description of Artificial Sequence: Synthetic oligonucleotide
  Target: ANGPTL4; (-) strand; PAM type: YTN; PAM sequence: CTT
tcacccagttggctgtggac

SEQ ID NO: 14425 - DNA, 20 bp, Artificial Sequence
  Description of Artificial Sequence: Synthetic oligonucleotide
  Target: ANGPTL4; (-) strand; PAM type: YTN; PAM sequence: CTA
gggtgtgagagggggatcca

SEQ ID NO: 14426 - DNA, 20 bp, Artificial Sequence
  Description of Artificial Sequence: Synthetic oligonucleotide
  Target: ANGPTL4; (-) strand; PAM type: YTN; PAM sequence: CTG
accctagggtgtgagagggg

SEQ ID NO: 14427 - DNA, 20 bp, Artificial Sequence
  Description of Artificial Sequence: Synthetic oligonucleotide
  Target: ANGPTL4; (-) strand; PAM type: YTN; PAM sequence: CTG
ccactgaccctagggtgtga

SEQ ID NO: 14428 - DNA, 20 bp, Artificial Sequence
  Description of Artificial Sequence: Synthetic oligonucleotide
  Target: ANGPTL4; (-) strand; PAM type: YTN; PAM sequence: CTG
gaagcctgccactgacccta

SEQ ID NO: 14429 - DNA, 20 bp, Artificial Sequence
  Description of Artificial Sequence: Synthetic oligonucleotide
  Target: ANGPTL4; (-) strand; PAM type: YTN; PAM sequence: CTA
cagtgctggaagcctgccac

SEQ ID NO: 14430 - DNA, 20 bp, Artificial Sequence
  Description of Artificial Sequence: Synthetic oligonucleotide
  Target: ANGPTL4; (-) strand; PAM type: YTN; PAM sequence: CTC
aggtctacagtgctggaagc

SEQ ID NO: 14431 - DNA, 20 bp, Artificial Sequence
  Description of Artificial Sequence: Synthetic oligonucleotide
  Target: ANGPTL4; (-) strand; PAM type: YTN; PAM sequence: TTG
gggaggagagaaccctcagg

SEQ ID NO: 14432 - DNA, 20 bp, Artificial Sequence
  Description of Artificial Sequence: Synthetic oligonucleotide
  Target: ANGPTL4; (-) strand; PAM type: YTN; PAM sequence: CTT
ggggaggagagaaccctcag

SEQ ID NO: 14433 - DNA, 20 bp, Artificial Sequence
  Description of Artificial Sequence: Synthetic oligonucleotide
  Target: ANGPTL4; (-) strand; PAM type: YTN; PAM sequence: TTG
ggggcgggcagcacggaggt

SEQ ID NO: 14434 - DNA, 20 bp, Artificial Sequence
  Description of Artificial Sequence: Synthetic oligonucleotide
  Target: ANGPTL4; (-) strand; PAM type: YTN; PAM sequence: CTG
gcggggttgggggcgggcag

SEQ ID NO: 14435 - DNA, 20 bp, Artificial Sequence
  Description of Artificial Sequence: Synthetic oligonucleotide
  Target: ANGPTL4; (-) strand; PAM type: YTN; PAM sequence: CTA
gcctggcggggttgggggcg

SEQ ID NO: 14436 - DNA, 20 bp, Artificial Sequence
  Description of Artificial Sequence: Synthetic oligonucleotide
  Target: ANGPTL4; (-) strand; PAM type: YTN; PAM sequence: CTG
agatgctagcctggcggggt

SEQ ID NO: 14437 - DNA, 20 bp, Artificial Sequence
  Description of Artificial Sequence: Synthetic oligonucleotide
  Target: ANGPTL4; (-) strand; PAM type: YTN; PAM sequence: CTG
accacgctgagatgctagcc

SEQ ID NO: 14438 - DNA, 20 bp, Artificial Sequence
  Description of Artificial Sequence: Synthetic oligonucleotide
  Target: ANGPTL4; (-) strand; PAM type: YTN; PAM sequence: TTG
ggagggtggacaggaccctg

SEQ ID NO: 14439 - DNA, 20 bp, Artificial Sequence
  Description of Artificial Sequence: Synthetic oligonucleotide
  Target: ANGPTL4; (-) strand; PAM type: YTN; PAM sequence: TTT
gggagggtggacaggaccct

SEQ ID NO: 14440 - DNA, 20 bp, Artificial Sequence
  Description of Artificial Sequence: Synthetic oligonucleotide
  Target: ANGPTL4; (-) strand; PAM type: YTN; PAM sequence: CTT
tgggagggtggacaggaccc

SEQ ID NO: 14441 - DNA, 20 bp, Artificial Sequence
  Description of Artificial Sequence: Synthetic oligonucleotide
  Target: ANGPTL4; (-) strand; PAM type: YTN; PAM sequence: CTG
ggatggtggctttgggaggg

SEQ ID NO: 14442 - DNA, 20 bp, Artificial Sequence
  Description of Artificial Sequence: Synthetic oligonucleotide
  Target: ANGPTL4; (-) strand; PAM type: YTN; PAM sequence: CTC
atcctgggatggtggctttg

SEQ ID NO: 14443 - DNA, 20 bp, Artificial Sequence
  Description of Artificial Sequence: Synthetic oligonucleotide
  Target: ANGPTL4; (-) strand; PAM type: YTN; PAM sequence: CTC
cagaagcccctcatcctggg

SEQ ID NO: 14444 - DNA, 20 bp, Artificial Sequence
  Description of Artificial Sequence: Synthetic oligonucleotide
  Target: ANGPTL4; (-) strand; PAM type: YTN; PAM sequence: TTC
ccccgtcaccctccagaagc

SEQ ID NO: 14445 - DNA, 20 bp, Artificial Sequence
  Description of Artificial Sequence: Synthetic oligonucleotide
  Target: ANGPTL4; (-) strand; PAM type: YTN; PAM sequence: CTT
cccccgtcaccctccagaag

SEQ ID NO: 14446 - DNA, 20 bp, Artificial Sequence
  Description of Artificial Sequence: Synthetic oligonucleotide
  Target: ANGPTL4; (-) strand; PAM type: YTN; PAM sequence: TTG
tgccttcccccgtcaccctc

SEQ ID NO: 14447 - DNA, 20 bp, Artificial Sequence
  Description of Artificial Sequence: Synthetic oligonucleotide
  Target: ANGPTL4; (-) strand; PAM type: YTN; PAM sequence: CTT
gtgccttcccccgtcaccct

SEQ ID NO: 14448 - DNA, 20 bp, Artificial Sequence
  Description of Artificial Sequence: Synthetic oligonucleotide
  Target: ANGPTL4; (-) strand; PAM type: YTN; PAM sequence: TTC
ccagccaggacttgtgcctt

SEQ ID NO: 14449 - DNA, 20 bp, Artificial Sequence
  Description of Artificial Sequence: Synthetic oligonucleotide
  Target: ANGPTL4; (-) strand; PAM type: YTN; PAM sequence: TTT
cccagccaggacttgtgcct

SEQ ID NO: 14450 - DNA, 20 bp, Artificial Sequence
  Description of Artificial Sequence: Synthetic oligonucleotide
  Target: ANGPTL4; (-) strand; PAM type: YTN; PAM sequence: TTC
caccgcatttcccagccagg

SEQ ID NO: 14451 - DNA, 20 bp, Artificial Sequence
  Description of Artificial Sequence: Synthetic oligonucleotide
  Target: ANGPTL4; (-) strand; PAM type: YTN; PAM sequence: CTT
ccaccgcatttcccagccag

SEQ ID NO: 14452 - DNA, 20 bp, Artificial Sequence
  Description of Artificial Sequence: Synthetic oligonucleotide
  Target: ANGPTL4; (-) strand; PAM type: YTN; PAM sequence: CTG
cccccttccaccgcatttcc

SEQ ID NO: 14453 - DNA, 20 bp, Artificial Sequence
  Description of Artificial Sequence: Synthetic oligonucleotide
  Target: ANGPTL4; (-) strand; PAM type: YTN; PAM sequence: CTG
ggagtcccgaacccacagaa

SEQ ID NO: 14454 - DNA, 20 bp, Artificial Sequence
  Description of Artificial Sequence: Synthetic oligonucleotide
  Target: ANGPTL4; (-) strand; PAM type: YTN; PAM sequence: CTG
agccaagagtctgggagtcc

SEQ ID NO: 14455 - DNA, 20 bp, Artificial Sequence
  Description of Artificial Sequence: Synthetic oligonucleotide
  Target: ANGPTL4; (-) strand; PAM type: YTN; PAM sequence: TTG
gcgggcctgagccaagagtc

SEQ ID NO: 14456 - DNA, 20 bp, Artificial Sequence
  Description of Artificial Sequence: Synthetic oligonucleotide
  Target: ANGPTL4; (-) strand; PAM type: YTN; PAM sequence: CTT
ggcgggcctgagccaagagt

SEQ ID NO: 14457 - DNA, 20 bp, Artificial Sequence
  Description of Artificial Sequence: Synthetic oligonucleotide
  Target: ANGPTL4; (-) strand; PAM type: YTN; PAM sequence: CTA
cttggcgggcctgagccaag

SEQ ID NO: 14458 - DNA, 20 bp, Artificial Sequence
  Description of Artificial Sequence: Synthetic oligonucleotide
  Target: ANGPTL4; (-) strand; PAM type: YTN; PAM sequence: CTC
ctacttggcgggcctgagcc

SEQ ID NO: 14459 - DNA, 20 bp, Artificial Sequence
  Description of Artificial Sequence: Synthetic oligonucleotide
  Target: ANGPTL4; (-) strand; PAM type: YTN; PAM sequence: TTC
tcctacttggcgggcctgag

SEQ ID NO: 14460 - DNA, 20 bp, Artificial Sequence
  Description of Artificial Sequence: Synthetic oligonucleotide
  Target: ANGPTL4; (-) strand; PAM type: YTN; PAM sequence: TTT
ctcctacttggcgggcctga

SEQ ID NO: 14461 - DNA, 20 bp, Artificial Sequence
  Description of Artificial Sequence: Synthetic oligonucleotide
  Target: ANGPTL4; (-) strand; PAM type: YTN; PAM sequence: CTT
tctcctacttggcgggcctg

SEQ ID NO: 14462 - DNA, 20 bp, Artificial Sequence
  Description of Artificial Sequence: Synthetic oligonucleotide
  Target: ANGPTL4; (-) strand; PAM type: YTN; PAM sequence: CTG
aactttctcctacttggcgg

SEQ ID NO: 14463 - DNA, 20 bp, Artificial Sequence
  Description of Artificial Sequence: Synthetic oligonucleotide
  Target: ANGPTL4; (-) strand; PAM type: YTN; PAM sequence: CTC
tgaactttctcctacttggc

SEQ ID NO: 14464 - DNA, 20 bp, Artificial Sequence
  Description of Artificial Sequence: Synthetic oligonucleotide
  Target: ANGPTL4; (-) strand; PAM type: YTN; PAM sequence: TTC
ccagctctgaactttctcct

SEQ ID NO: 14465 - DNA, 20 bp, Artificial Sequence
  Description of Artificial Sequence: Synthetic oligonucleotide
  Target: ANGPTL4; (-) strand; PAM type: YTN; PAM sequence: CTT
cccagctctgaactttctcc

SEQ ID NO: 14466 - DNA, 20 bp, Artificial Sequence
  Description of Artificial Sequence: Synthetic oligonucleotide
  Target: ANGPTL4; (-) strand; PAM type: YTN; PAM sequence: TTC
gccttcccagctctgaactt

SEQ ID NO: 14467 - DNA, 20 bp, Artificial Sequence
  Description of Artificial Sequence: Synthetic oligonucleotide
  Target: ANGPTL4; (-) strand; PAM type: YTN; PAM sequence: CTG
ttcgccttcccagctctgaa

SEQ ID NO: 14468 - DNA, 20 bp, Artificial Sequence
  Description of Artificial Sequence: Synthetic oligonucleotide
  Target: ANGPTL4; (-) strand; PAM type: YTN; PAM sequence: TTC
catgaatgccagctgttcgc

SEQ ID NO: 14469 - DNA, 20 bp, Artificial Sequence
  Description of Artificial Sequence: Synthetic oligonucleotide
  Target: ANGPTL4; (-) strand; PAM type: YTN; PAM sequence: CTT
ccatgaatgccagctgttcg

SEQ ID NO: 14470 - DNA, 20 bp, Artificial Sequence
  Description of Artificial Sequence: Synthetic oligonucleotide
  Target: ANGPTL4; (-) strand; PAM type: YTN; PAM sequence: CTC
ccatccagtaaggatgggca

SEQ ID NO: 14471 - DNA, 20 bp, Artificial Sequence
  Description of Artificial Sequence: Synthetic oligonucleotide
  Target: ANGPTL4; (-) strand; PAM type: YTN; PAM sequence: TTC
ctcccatccagtaaggatgg

SEQ ID NO: 14472 - DNA, 20 bp, Artificial Sequence
  Description of Artificial Sequence: Synthetic oligonucleotide
  Target: ANGPTL4; (-) strand; PAM type: YTN; PAM sequence: TTT
cctcccatccagtaaggatg

SEQ ID NO: 14473 - DNA, 20 bp, Artificial Sequence
  Description of Artificial Sequence: Synthetic oligonucleotide
  Target: ANGPTL4; (-) strand; PAM type: YTN; PAM sequence: CTT
tcctcccatccagtaaggat

SEQ ID NO: 14474 - DNA, 20 bp, Artificial Sequence
  Description of Artificial Sequence: Synthetic oligonucleotide
  Target: ANGPTL4; (-) strand; PAM type: YTN; PAM sequence: CTA
ctttcctcccatccagtaag

SEQ ID NO: 14475 - DNA, 20 bp, Artificial Sequence
  Description of Artificial Sequence: Synthetic oligonucleotide
  Target: ANGPTL4; (-) strand; PAM type: YTN; PAM sequence: TTC
ccctactttcctcccatcca

SEQ ID NO: 14476 - DNA, 20 bp, Artificial Sequence
  Description of Artificial Sequence: Synthetic oligonucleotide
  Target: ANGPTL4; (-) strand; PAM type: YTN; PAM sequence: TTT
cccctactttcctcccatcc

SEQ ID NO: 14477 - DNA, 20 bp, Artificial Sequence
  Description of Artificial Sequence: Synthetic oligonucleotide
  Target: ANGPTL4; (-) strand; PAM type: YTN; PAM sequence: CTT
tcccctactttcctcccatc

SEQ ID NO: 14478 - DNA, 20 bp, Artificial Sequence
  Description of Artificial Sequence: Synthetic oligonucleotide
  Target: ANGPTL4; (-) strand; PAM type: YTN; PAM sequence: CTC
ccctttcccctactttcctc

SEQ ID NO: 14479 - DNA, 20 bp, Artificial Sequence
  Description of Artificial Sequence: Synthetic oligonucleotide
  Target: ANGPTL4; (-) strand; PAM type: YTN; PAM sequence: CTC
aggcatctcccctttcccct

SEQ ID NO: 14480 - DNA, 20 bp, Artificial Sequence
  Description of Artificial Sequence: Synthetic oligonucleotide
  Target: ANGPTL4; (-) strand; PAM type: YTN; PAM sequence: TTC
cggcccctcaggcatctccc

SEQ ID NO: 14481 - DNA, 20 bp, Artificial Sequence
  Description of Artificial Sequence: Synthetic oligonucleotide
  Target: ANGPTL4; (-) strand; PAM type: YTN; PAM sequence: TTT
ccggcccctcaggcatctcc

SEQ ID NO: 14482 - DNA, 20 bp, Artificial Sequence
  Description of Artificial Sequence: Synthetic oligonucleotide
  Target: ANGPTL4; (-) strand; PAM type: YTN; PAM sequence: CTT
tccggcccctcaggcatctc

SEQ ID NO: 14483 - DNA, 20 bp, Artificial Sequence
  Description of Artificial Sequence: Synthetic oligonucleotide
  Target: ANGPTL4; (-) strand; PAM type: YTN; PAM sequence: CTG
cacggtgggggtgggggcgg

SEQ ID NO: 14484 - DNA, 20 bp, Artificial Sequence
  Description of Artificial Sequence: Synthetic oligonucleotide
  Target: ANGPTL4; (-) strand; PAM type: YTN; PAM sequence: CTG
ggaggaaccgcccccagccc

SEQ ID NO: 14485 - DNA, 20 bp, Artificial Sequence
  Description of Artificial Sequence: Synthetic oligonucleotide
  Target: ANGPTL4; (-) strand; PAM type: YTN; PAM sequence: CTC
cagactgggaggaaccgccc

SEQ ID NO: 14486 - DNA, 20 bp, Artificial Sequence
  Description of Artificial Sequence: Synthetic oligonucleotide
  Target: ANGPTL4; (-) strand; PAM type: YTN; PAM sequence: CTC
agacgctccagactgggagg

SEQ ID NO: 14487 - DNA, 20 bp, Artificial Sequence
  Description of Artificial Sequence: Synthetic oligonucleotide
  Target: ANGPTL4; (-) strand; PAM type: YTN; PAM sequence: CTG
gaggctcagacgctccagac

SEQ ID NO: 14488 - DNA, 20 bp, Artificial Sequence
  Description of Artificial Sequence: Synthetic oligonucleotide
  Target: ANGPTL4; (-) strand; PAM type: YTN; PAM sequence: TTG
agcacgtctggaggctcaga

SEQ ID NO: 14489 - DNA, 20 bp, Artificial Sequence
  Description of Artificial Sequence: Synthetic oligonucleotide
  Target: ANGPTL4; (-) strand; PAM type: YTN; PAM sequence: TTG
aggaaagaaagagggaggga

SEQ ID NO: 14490 - DNA, 20 bp, Artificial Sequence
  Description of Artificial Sequence: Synthetic oligonucleotide
  Target: ANGPTL4; (-) strand; PAM type: YTN; PAM sequence: CTA
gagggagaggaggcagggtt

SEQ ID NO: 14491 - DNA, 20 bp, Artificial Sequence
  Description of Artificial Sequence: Synthetic oligonucleotide
  Target: ANGPTL4; (-) strand; PAM type: YTN; PAM sequence: CTC
ctagagggagaggaggcagg

SEQ ID NO: 14492 - DNA, 20 bp, Artificial Sequence
  Description of Artificial Sequence: Synthetic oligonucleotide
  Target: ANGPTL4; (-) strand; PAM type: YTN; PAM sequence: CTG
gggtcccagctcctagaggg

SEQ ID NO: 14493 - DNA, 20 bp, Artificial Sequence
  Description of Artificial Sequence: Synthetic oligonucleotide
  Target: ANGPTL4; (-) strand; PAM type: YTN; PAM sequence: CTG
cctggggtcccagctcctag

SEQ ID NO: 14494 - DNA, 20 bp, Artificial Sequence
  Description of Artificial Sequence: Synthetic oligonucleotide
  Target: ANGPTL4; (-) strand; PAM type: YTN; PAM sequence: CTC
tgcctggggtcccagctcct

SEQ ID NO: 14495 - DNA, 20 bp, Artificial Sequence
  Description of Artificial Sequence: Synthetic oligonucleotide
  Target: ANGPTL4; (-) strand; PAM type: YTN; PAM sequence: CTC
agaggctctgcctggggtcc

SEQ ID NO: 14496 - DNA, 20 bp, Artificial Sequence
  Description of Artificial Sequence: Synthetic oligonucleotide
  Target: ANGPTL4; (-) strand; PAM type: YTN; PAM sequence: CTG
agcaggagcatctcagaggc

SEQ ID NO: 14497 - DNA, 20 bp, Artificial Sequence
  Description of Artificial Sequence: Synthetic oligonucleotide
  Target: ANGPTL4; (-) strand; PAM type: YTN; PAM sequence: CTG
tgctgagcaggagcatctca

SEQ ID NO: 14498 - DNA, 20 bp, Artificial Sequence
  Description of Artificial Sequence: Synthetic oligonucleotide
  Target: ANGPTL4; (-) strand; PAM type: YTN; PAM sequence: TTG
acaaatgaatgaatgaatga

SEQ ID NO: 14499 - DNA, 20 bp, Artificial Sequence
  Description of Artificial Sequence: Synthetic oligonucleotide
  Target: ANGPTL4; (-) strand; PAM type: YTN; PAM sequence: CTT
gacaaatgaatgaatgaatg

SEQ ID NO: 14500 - DNA, 20 bp, Artificial Sequence
  Description of Artificial Sequence: Synthetic oligonucleotide
  Target: ANGPTL4; (-) strand; PAM type: YTN; PAM sequence: CTC
aaaaagcaaacaaaacagtc

SEQ ID NO: 14501 - DNA, 20 bp, Artificial Sequence
  Description of Artificial Sequence: Synthetic oligonucleotide
  Target: ANGPTL4; (-) strand; PAM type: YTN; PAM sequence: CTC
cgtctcaaaaagcaaacaaa

SEQ ID NO: 14502 - DNA, 20 bp, Artificial Sequence
  Description of Artificial Sequence: Synthetic oligonucleotide
  Target: ANGPTL4; (-) strand; PAM type: YTN; PAM sequence: CTG
gacaacagagcgagactccg

SEQ ID NO: 14503 - DNA, 20 bp, Artificial Sequence
  Description of Artificial Sequence: Synthetic oligonucleotide
  Target: ANGPTL4; (-) strand; PAM type: YTN; PAM sequence: CTC
cagcctggacaacagagcga

SEQ ID NO: 14504 - DNA, 20 bp, Artificial Sequence
  Description of Artificial Sequence: Synthetic oligonucleotide
  Target: ANGPTL4; (-) strand; PAM type: YTN; PAM sequence: CTG
cactccagcctggacaacag

SEQ ID NO: 14505 - DNA, 20 bp, Artificial Sequence
  Description of Artificial Sequence: Synthetic oligonucleotide
  Target: ANGPTL4; (-) strand; PAM type: YTN; PAM sequence: TTG
cgccactgcactccagcctg

SEQ ID NO: 14506 - DNA, 20 bp, Artificial Sequence
  Description of Artificial Sequence: Synthetic oligonucleotide
  Target: ANGPTL4; (-) strand; PAM type: YTN; PAM sequence: CTG
agattgcgccactgcactcc

SEQ ID NO: 14507 - DNA, 20 bp, Artificial Sequence
  Description of Artificial Sequence: Synthetic oligonucleotide
  Target: ANGPTL4; (-) strand; PAM type: YTN; PAM sequence: TTG
cagtgagctgagattgcgcc

SEQ ID NO: 14508 - DNA, 20 bp, Artificial Sequence
  Description of Artificial Sequence: Synthetic oligonucleotide
  Target: ANGPTL4; (-) strand; PAM type: YTN; PAM sequence: TTG
aacccagtgggaggcagagg

SEQ ID NO: 14509 - DNA, 20 bp, Artificial Sequence
  Description of Artificial Sequence: Synthetic oligonucleotide
  Target: ANGPTL4; (-) strand; PAM type: YTN; PAM sequence: CTT
gaacccagtgggaggcagag

SEQ ID NO: 14510 - DNA, 20 bp, Artificial Sequence
  Description of Artificial Sequence: Synthetic oligonucleotide
  Target: ANGPTL4; (-) strand; PAM type: YTN; PAM sequence: CTG
aggcaggagaatcacttgaa

SEQ ID NO: 14511 - DNA, 20 bp, Artificial Sequence
  Description of Artificial Sequence: Synthetic oligonucleotide
  Target: ANGPTL4; (-) strand; PAM type: YTN; PAM sequence: TTG
agaggctgaggcaggagaat

SEQ ID NO: 14512 - DNA, 20 bp, Artificial Sequence
  Description of Artificial Sequence: Synthetic oligonucleotide
  Target: ANGPTL4; (-) strand; PAM type: YTN; PAM sequence: CTT
gagaggctgaggcaggagaa

SEQ ID NO: 14513 - DNA, 20 bp, Artificial Sequence
  Description of Artificial Sequence: Synthetic oligonucleotide
  Target: ANGPTL4; (-) strand; PAM type: YTN; PAM sequence: CTA
cttgagaggctgaggcagga

SEQ ID NO: 14514 - DNA, 20 bp, Artificial Sequence
  Description of Artificial Sequence: Synthetic oligonucleotide
  Target: ANGPTL4; (-) strand; PAM type: YTN; PAM sequence: CTA
taatcccatctacttgagag

SEQ ID NO: 14515 - DNA, 20 bp, Artificial Sequence
  Description of Artificial Sequence: Synthetic oligonucleotide
  Target: ANGPTL4; (-) strand; PAM type: YTN; PAM sequence: CTG
ggcgtggtggcggtaggcgc

SEQ ID NO: 14516 - DNA, 20 bp, Artificial Sequence
  Description of Artificial Sequence: Synthetic oligonucleotide
  Target: ANGPTL4; (-) strand; PAM type: YTN; PAM sequence: TTA
gctgggcgtggtggcggtag

SEQ ID NO: 14517 - DNA, 20 bp, Artificial Sequence
  Description of Artificial Sequence: Synthetic oligonucleotide
  Target: ANGPTL4; (-) strand; PAM type: YTN; PAM sequence: TTG
ataaatgaataaaaattagc

SEQ ID NO: 14518 - DNA, 20 bp, Artificial Sequence
  Description of Artificial Sequence: Synthetic oligonucleotide
  Target: ANGPTL4; (-) strand; PAM type: YTN; PAM sequence: CTT
gataaatgaataaaaattag

SEQ ID NO: 14519 - DNA, 20 bp, Artificial Sequence
  Description of Artificial Sequence: Synthetic oligonucleotide
  Target: ANGPTL4; (-) strand; PAM type: YTN; PAM sequence: CTC
aaaaaaaaaaaagacttgat

SEQ ID NO: 14520 - DNA, 20 bp, Artificial Sequence
  Description of Artificial Sequence: Synthetic oligonucleotide
  Target: ANGPTL4; (-) strand; PAM type: YTN; PAM sequence: CTG
tctcaaaaaaaaaaaagact

SEQ ID NO: 14521 - DNA, 20 bp, Artificial Sequence
  Description of Artificial Sequence: Synthetic oligonucleotide
  Target: ANGPTL4; (-) strand; PAM type: YTN; PAM sequence: CTC
tgtctcaaaaaaaaaaaaga

SEQ ID NO: 14522 - DNA, 20 bp, Artificial Sequence
  Description of Artificial Sequence: Synthetic oligonucleotide
  Target: ANGPTL4; (-) strand; PAM type: YTN; PAM sequence: CTG
ggtgacagagtgagactctg

SEQ ID NO: 14523 - DNA, 20 bp, Artificial Sequence
  Description of Artificial Sequence: Synthetic oligonucleotide
  Target: ANGPTL4; (-) strand; PAM type: YTN; PAM sequence: CTC
caacctgggtgacagagtga

SEQ ID NO: 14524 - DNA, 20 bp, Artificial Sequence
  Description of Artificial Sequence: Synthetic oligonucleotide
  Target: ANGPTL4; (-) strand; PAM type: YTN; PAM sequence: TTG
cactccaacctgggtgacag

SEQ ID NO: 14525 - DNA, 20 bp, Artificial Sequence
  Description of Artificial Sequence: Synthetic oligonucleotide
  Target: ANGPTL4; (-) strand; PAM type: YTN; PAM sequence: TTG
aaccattgcactccaacctg

SEQ ID NO: 14526 - DNA, 20 bp, Artificial Sequence
  Description of Artificial Sequence: Synthetic oligonucleotide
  Target: ANGPTL4; (-) strand; PAM type: YTN; PAM sequence: CTG
aggttgaaccattgcactcc

SEQ ID NO: 14527 - DNA, 20 bp, Artificial Sequence
  Description of Artificial Sequence: Synthetic oligonucleotide
  Target: ANGPTL4; (-) strand; PAM type: YTN; PAM sequence: TTG
cagtcagctgaggttgaacc

SEQ ID NO: 14528 - DNA, 20 bp, Artificial Sequence
  Description of Artificial Sequence: Synthetic oligonucleotide
  Target: ANGPTL4; (-) strand; PAM type: YTN; PAM sequence: TTG
aacccgggaggcagaggttg

SEQ ID NO: 14529 - DNA, 20 bp, Artificial Sequence
  Description of Artificial Sequence: Synthetic oligonucleotide
  Target: ANGPTL4; (-) strand; PAM type: YTN; PAM sequence: CTT
gaacccgggaggcagaggtt

SEQ ID NO: 14530 - DNA, 20 bp, Artificial Sequence
  Description of Artificial Sequence: Synthetic oligonucleotide
  Target: ANGPTL4; (-) strand; PAM type: YTN; PAM sequence: TTA
ggaggcagaggcaggagaat

SEQ ID NO: 14531 - DNA, 20 bp, Artificial Sequence
  Description of Artificial Sequence: Synthetic oligonucleotide
  Target: ANGPTL4; (-) strand; PAM type: YTN; PAM sequence: CTT
aggaggcagaggcaggagaa

SEQ ID NO: 14532 - DNA, 20 bp, Artificial Sequence
  Description of Artificial Sequence: Synthetic oligonucleotide
  Target: ANGPTL4; (-) strand; PAM type: YTN; PAM sequence: CTC
cttaggaggcagaggcagga

SEQ ID NO: 14533 - DNA, 20 bp, Artificial Sequence
  Description of Artificial Sequence: Synthetic oligonucleotide
  Target: ANGPTL4; (-) strand; PAM type: YTN; PAM sequence: CTG
ggtgtgatggtggacgccag

SEQ ID NO: 14534 - DNA, 20 bp, Artificial Sequence
  Description of Artificial Sequence: Synthetic oligonucleotide
  Target: ANGPTL4; (-) strand; PAM type: YTN; PAM sequence: TTA
gctgggtgtgatggtggacg

SEQ ID NO: 14535 - DNA, 20 bp, Artificial Sequence
  Description of Artificial Sequence: Synthetic oligonucleotide
  Target: ANGPTL4; (-) strand; PAM type: YTN; PAM sequence: CTA
gtaaaacatacaaagattag

SEQ ID NO: 14536 - DNA, 20 bp, Artificial Sequence
  Description of Artificial Sequence: Synthetic oligonucleotide
  Target: ANGPTL4; (-) strand; PAM type: YTN; PAM sequence: CTC
tagtaaaacatacaaagatt

SEQ ID NO: 14537 - DNA, 20 bp, Artificial Sequence
  Description of Artificial Sequence: Synthetic oligonucleotide
  Target: ANGPTL4; (-) strand; PAM type: YTN; PAM sequence: CTG
gtcaacatggccaaacccca

SEQ ID NO: 14538 - DNA, 20 bp, Artificial Sequence
  Description of Artificial Sequence: Synthetic oligonucleotide
  Target: ANGPTL4; (-) strand; PAM type: YTN; PAM sequence: TTG
agaccagcctggtcaacatg

SEQ ID NO: 14539 - DNA, 20 bp, Artificial Sequence
  Description of Artificial Sequence: Synthetic oligonucleotide
  Target: ANGPTL4; (-) strand; PAM type: YTN; PAM sequence: TTT
gagaccagcctggtcaacat

SEQ ID NO: 14540 - DNA, 20 bp, Artificial Sequence
  Description of Artificial Sequence: Synthetic oligonucleotide
  Target: ANGPTL4; (-) strand; PAM type: YTN; PAM sequence: TTG
ggaggcgggcggatcggtca

SEQ ID NO: 14541 - DNA, 20 bp, Artificial Sequence
  Description of Artificial Sequence: Synthetic oligonucleotide
  Target: ANGPTL4; (-) strand; PAM type: YTN; PAM sequence: TTT
gggaggcgggcggatcggtc

SEQ ID NO: 14542 - DNA, 20 bp, Artificial Sequence
  Description of Artificial Sequence: Synthetic oligonucleotide
  Target: ANGPTL4; (-) strand; PAM type: YTN; PAM sequence: CTT
tgggaggcgggcggatcggt

SEQ ID NO: 14543 - DNA, 20 bp, Artificial Sequence
  Description of Artificial Sequence: Synthetic oligonucleotide
  Target: ANGPTL4; (-) strand; PAM type: YTN; PAM sequence: CTG
taatccagcactttgggagg

SEQ ID NO: 14544 - DNA, 20 bp, Artificial Sequence
  Description of Artificial Sequence: Synthetic oligonucleotide
  Target: ANGPTL4; (-) strand; PAM type: YTN; PAM sequence: TTC
atgcctgtaatccagcactt

SEQ ID NO: 14545 - DNA, 20 bp, Artificial Sequence
  Description of Artificial Sequence: Synthetic oligonucleotide
  Target: ANGPTL4; (-) strand; PAM type: YTN; PAM sequence: TTG
aggaatgggccgggcgcagt

SEQ ID NO: 14546 - DNA, 20 bp, Artificial Sequence
  Description of Artificial Sequence: Synthetic oligonucleotide
  Target: ANGPTL4; (-) strand; PAM type: YTN; PAM sequence: CTT
gaggaatgggccgggcgcag

SEQ ID NO: 14547 - DNA, 20 bp, Artificial Sequence
  Description of Artificial Sequence: Synthetic oligonucleotide
  Target: ANGPTL4; (-) strand; PAM type: YTN; PAM sequence: CTC
aataaagacttgaggaatgg

SEQ ID NO: 14548 - DNA, 20 bp, Artificial Sequence
  Description of Artificial Sequence: Synthetic oligonucleotide
  Target: ANGPTL4; (-) strand; PAM type: YTN; PAM sequence: CTG
ctcaataaagacttgaggaa

SEQ ID NO: 14549 - DNA, 20 bp, Artificial Sequence
  Description of Artificial Sequence: Synthetic oligonucleotide
  Target: ANGPTL4; (-) strand; PAM type: YTN; PAM sequence: CTG
gcaccagcatccacgcaggc

SEQ ID NO: 14550 - DNA, 20 bp, Artificial Sequence
  Description of Artificial Sequence: Synthetic oligonucleotide
  Target: ANGPTL4; (-) strand; PAM type: YTN; PAM sequence: CTG
cccacagcctggcaccagca

SEQ ID NO: 14551 - DNA, 20 bp, Artificial Sequence
  Description of Artificial Sequence: Synthetic oligonucleotide
  Target: ANGPTL4; (-) strand; PAM type: YTN; PAM sequence: CTC
tgcccacagcctggcaccag

SEQ ID NO: 14552 - DNA, 20 bp, Artificial Sequence
  Description of Artificial Sequence: Synthetic oligonucleotide
  Target: ANGPTL4; (-) strand; PAM type: YTN; PAM sequence: CTG
gggacaaggagcagctctgc

SEQ ID NO: 14553 - DNA, 20 bp, Artificial Sequence
  Description of Artificial Sequence: Synthetic oligonucleotide
  Target: ANGPTL4; (-) strand; PAM type: YTN; PAM sequence: CTC
catgaggctggggacaagga

SEQ ID NO: 14554 - DNA, 20 bp, Artificial Sequence
  Description of Artificial Sequence: Synthetic oligonucleotide
  Target: ANGPTL4; (-) strand; PAM type: YTN; PAM sequence: CTC
aatggaggctccatgaggct

SEQ ID NO: 14555 - DNA, 20 bp, Artificial Sequence
  Description of Artificial Sequence: Synthetic oligonucleotide
  Target: ANGPTL4; (-) strand; PAM type: YTN; PAM sequence: CTG
actcaatggaggctccatga

SEQ ID NO: 14556 - DNA, 20 bp, Artificial Sequence
  Description of Artificial Sequence: Synthetic oligonucleotide
  Target: ANGPTL4; (-) strand; PAM type: YTN; PAM sequence: CTC
tgactcaatggaggctccat

SEQ ID NO: 14557 - DNA, 20 bp, Artificial Sequence
  Description of Artificial Sequence: Synthetic oligonucleotide
  Target: ANGPTL4; (-) strand; PAM type: YTN; PAM sequence: CTC
ctctgactcaatggaggctc

SEQ ID NO: 14558 - DNA, 20 bp, Artificial Sequence
  Description of Artificial Sequence: Synthetic oligonucleotide
  Target: ANGPTL4; (-) strand; PAM type: YTN; PAM sequence: CTC
tcctctgactcaatggaggc

SEQ ID NO: 14559 - DNA, 20 bp, Artificial Sequence
  Description of Artificial Sequence: Synthetic oligonucleotide
  Target: ANGPTL4; (-) strand; PAM type: YTN; PAM sequence: CTA
atggtctctcctctgactca

SEQ ID NO: 14560 - DNA, 20 bp, Artificial Sequence
  Description of Artificial Sequence: Synthetic oligonucleotide
  Target: ANGPTL4; (-) strand; PAM type: YTN; PAM sequence: CTG
aggtcatctaatggtctctc

SEQ ID NO: 14561 - DNA, 20 bp, Artificial Sequence
  Description of Artificial Sequence: Synthetic oligonucleotide
  Target: ANGPTL4; (-) strand; PAM type: YTN; PAM sequence: CTG
gacactgaggtcatctaatg

SEQ ID NO: 14562 - DNA, 20 bp, Artificial Sequence
  Description of Artificial Sequence: Synthetic oligonucleotide
  Target: ANGPTL4; (-) strand; PAM type: YTN; PAM sequence: CTC
ctggacactgaggtcatcta

SEQ ID NO: 14563 - DNA, 20 bp, Artificial Sequence
  Description of Artificial Sequence: Synthetic oligonucleotide
  Target: ANGPTL4; (-) strand; PAM type: YTN; PAM sequence: TTC
ccactcctggacactgaggt

SEQ ID NO: 14564 - DNA, 20 bp, Artificial Sequence
  Description of Artificial Sequence: Synthetic oligonucleotide
  Target: ANGPTL4; (-) strand; PAM type: YTN; PAM sequence: CTT
cccactcctggacactgagg

SEQ ID NO: 14565 - DNA, 20 bp, Artificial Sequence
  Description of Artificial Sequence: Synthetic oligonucleotide
  Target: ANGPTL4; (-) strand; PAM type: YTN; PAM sequence: TTG
agcaaggacttcccactcct

SEQ ID NO: 14566 - DNA, 20 bp, Artificial Sequence
  Description of Artificial Sequence: Synthetic oligonucleotide
  Target: ANGPTL4; (-) strand; PAM type: YTN; PAM sequence: CTC
acccccagaccaggccagaa

SEQ ID NO: 14567 - DNA, 20 bp, Artificial Sequence
  Description of Artificial Sequence: Synthetic oligonucleotide
  Target: ANGPTL4; (-) strand; PAM type: YTN; PAM sequence: TTG
cctcacccccagaccaggcc

SEQ ID NO: 14568 - DNA, 20 bp, Artificial Sequence
  Description of Artificial Sequence: Synthetic oligonucleotide
  Target: ANGPTL4; (-) strand; PAM type: YTN; PAM sequence: CTT
gcctcacccccagaccaggc

SEQ ID NO: 14569 - DNA, 20 bp, Artificial Sequence
  Description of Artificial Sequence: Synthetic oligonucleotide
  Target: ANGPTL4; (-) strand; PAM type: YTN; PAM sequence: CTG
ccttgcctcacccccagacc

SEQ ID NO: 14570 - DNA, 20 bp, Artificial Sequence
  Description of Artificial Sequence: Synthetic oligonucleotide
  Target: ANGPTL4; (-) strand; PAM type: YTN; PAM sequence: CTG
gaaggacaccctgccttgcc

SEQ ID NO: 14571 - DNA, 20 bp, Artificial Sequence
  Description of Artificial Sequence: Synthetic oligonucleotide
  Target: ANGPTL4; (-) strand; PAM type: YTN; PAM sequence: TTC
tggaaggacaccctgccttg

SEQ ID NO: 14572 - DNA, 20 bp, Artificial Sequence
  Description of Artificial Sequence: Synthetic oligonucleotide
  Target: ANGPTL4; (-) strand; PAM type: YTN; PAM sequence: CTT
ctggaaggacaccctgcctt

SEQ ID NO: 14573 - DNA, 20 bp, Artificial Sequence
  Description of Artificial Sequence: Synthetic oligonucleotide
  Target: ANGPTL4; (-) strand; PAM type: YTN; PAM sequence: CTG
ggtcccagcttctggaagga

SEQ ID NO: 14574 - DNA, 20 bp, Artificial Sequence
  Description of Artificial Sequence: Synthetic oligonucleotide
  Target: ANGPTL4; (-) strand; PAM type: YTN; PAM sequence: CTC
tgggtcccagcttctggaag

SEQ ID NO: 14575 - DNA, 20 bp, Artificial Sequence
  Description of Artificial Sequence: Synthetic oligonucleotide
  Target: ANGPTL4; (-) strand; PAM type: YTN; PAM sequence: CTC
tctgggtcccagcttctgga

SEQ ID NO: 14576 - DNA, 20 bp, Artificial Sequence
  Description of Artificial Sequence: Synthetic oligonucleotide
  Target: ANGPTL4; (-) strand; PAM type: YTN; PAM sequence: CTC
tctctgggtcccagcttctg

SEQ ID NO: 14577 - DNA, 20 bp, Artificial Sequence
  Description of Artificial Sequence: Synthetic oligonucleotide
  Target: ANGPTL4; (-) strand; PAM type: YTN; PAM sequence: TTC
tctctctgggtcccagcttc

SEQ ID NO: 14578 - DNA, 20 bp, Artificial Sequence
  Description of Artificial Sequence: Synthetic oligonucleotide
  Target: ANGPTL4; (-) strand; PAM type: YTN; PAM sequence: CTT
ctctctctgggtcccagctt

SEQ ID NO: 14579 - DNA, 20 bp, Artificial Sequence
  Description of Artificial Sequence: Synthetic oligonucleotide
  Target: ANGPTL4; (-) strand; PAM type: YTN; PAM sequence: CTC
acttctctctctgggtccca

SEQ ID NO: 14580 - DNA, 20 bp, Artificial Sequence
  Description of Artificial Sequence: Synthetic oligonucleotide
  Target: ANGPTL4; (-) strand; PAM type: YTN; PAM sequence: TTC
ctcacttctctctctgggtc

SEQ ID NO: 14581 - DNA, 20 bp, Artificial Sequence
  Description of Artificial Sequence: Synthetic oligonucleotide
  Target: ANGPTL4; (-) strand; PAM type: YTN; PAM sequence: TTT
cctcacttctctctctgggt

SEQ ID NO: 14582 - DNA, 20 bp, Artificial Sequence
  Description of Artificial Sequence: Synthetic oligonucleotide
  Target: ANGPTL4; (-) strand; PAM type: YTN; PAM sequence: CTT
tcctcacttctctctctggg

SEQ ID NO: 14583 - DNA, 20 bp, Artificial Sequence
  Description of Artificial Sequence: Synthetic oligonucleotide
  Target: ANGPTL4; (-) strand; PAM type: YTN; PAM sequence: CTC
tttcctcacttctctctctg

SEQ ID NO: 14584 - DNA, 20 bp, Artificial Sequence
  Description of Artificial Sequence: Synthetic oligonucleotide
  Target: ANGPTL4; (-) strand; PAM type: YTN; PAM sequence: CTC
tctttcctcacttctctctc

SEQ ID NO: 14585 - DNA, 20 bp, Artificial Sequence
  Description of Artificial Sequence: Synthetic oligonucleotide
  Target: ANGPTL4; (-) strand; PAM type: YTN; PAM sequence: CTG
cgcccggcgggactctcttt

SEQ ID NO: 14586 - DNA, 20 bp, Artificial Sequence
  Description of Artificial Sequence: Synthetic oligonucleotide
  Target: ANGPTL4; (-) strand; PAM type: YTN; PAM sequence: TTA
caggtgtgaaccactgcgcc

SEQ ID NO: 14587 - DNA, 20 bp, Artificial Sequence
  Description of Artificial Sequence: Synthetic oligonucleotide
  Target: ANGPTL4; (-) strand; PAM type: YTN; PAM sequence: CTG
ggattacaggtgtgaaccac

SEQ ID NO: 14588 - DNA, 20 bp, Artificial Sequence
  Description of Artificial Sequence: Synthetic oligonucleotide
  Target: ANGPTL4; (-) strand; PAM type: YTN; PAM sequence: CTC
ccaaagtgctgggattacag

SEQ ID NO: 14589 - DNA, 20 bp, Artificial Sequence
  Description of Artificial Sequence: Synthetic oligonucleotide
  Target: ANGPTL4; (-) strand; PAM type: YTN; PAM sequence: TTG
gcctcccaaagtgctgggat

SEQ ID NO: 14590 - DNA, 20 bp, Artificial Sequence
  Description of Artificial Sequence: Synthetic oligonucleotide
  Target: ANGPTL4; (-) strand; PAM type: YTN; PAM sequence: CTT
ggcctcccaaagtgctggga

SEQ ID NO: 14591 - DNA, 20 bp, Artificial Sequence
  Description of Artificial Sequence: Synthetic oligonucleotide
  Target: ANGPTL4; (-) strand; PAM type: YTN; PAM sequence: CTC
gtgatccgccagccttggcc

SEQ ID NO: 14592 - DNA, 20 bp, Artificial Sequence
  Description of Artificial Sequence: Synthetic oligonucleotide
  Target: ANGPTL4; (-) strand; PAM type: YTN; PAM sequence: CTG
acctcgtgatccgccagcct

SEQ ID NO: 14593 - DNA, 20 bp, Artificial Sequence
  Description of Artificial Sequence: Synthetic oligonucleotide
  Target: ANGPTL4; (-) strand; PAM type: YTN; PAM sequence: CTC
ctgacctcgtgatccgccag

SEQ ID NO: 14594 - DNA, 20 bp, Artificial Sequence
  Description of Artificial Sequence: Synthetic oligonucleotide
  Target: ANGPTL4; (-) strand; PAM type: YTN; PAM sequence: CTC
gatctcctgacctcgtgatc

SEQ ID NO: 14595 - DNA, 20 bp, Artificial Sequence
  Description of Artificial Sequence: Synthetic oligonucleotide
  Target: ANGPTL4; (-) strand; PAM type: YTN; PAM sequence: CTG
gtctcgatctcctgacctcg

SEQ ID NO: 14596 - DNA, 20 bp, Artificial Sequence
  Description of Artificial Sequence: Synthetic oligonucleotide
  Target: ANGPTL4; (-) strand; PAM type: YTN; PAM sequence: TTG
gccagactggtctcgatctc

SEQ ID NO: 14597 - DNA, 20 bp, Artificial Sequence
  Description of Artificial Sequence: Synthetic oligonucleotide
  Target: ANGPTL4; (-) strand; PAM type: YTN; PAM sequence: TTC
accatgttggccagactggt

SEQ ID NO: 14598 - DNA, 20 bp, Artificial Sequence
  Description of Artificial Sequence: Synthetic oligonucleotide
  Target: ANGPTL4; (-) strand; PAM type: YTN; PAM sequence: TTT
caccatgttggccagactgg

SEQ ID NO: 14599 - DNA, 20 bp, Artificial Sequence
  Description of Artificial Sequence: Synthetic oligonucleotide
  Target: ANGPTL4; (-) strand; PAM type: YTN; PAM sequence: TTG
tagagacgggggtttcacca

SEQ ID NO: 14600 - DNA, 20 bp, Artificial Sequence
  Description of Artificial Sequence: Synthetic oligonucleotide
  Target: ANGPTL4; (-) strand; PAM type: YTN; PAM sequence: TTT
gtagagacgggggtttcacc

SEQ ID NO: 14601 - DNA, 20 bp, Artificial Sequence
  Description of Artificial Sequence: Synthetic oligonucleotide
  Target: ANGPTL4; (-) strand; PAM type: YTN; PAM sequence: TTA
tttgtagagacgggggtttc

SEQ ID NO: 14602 - DNA, 20 bp, Artificial Sequence
  Description of Artificial Sequence: Synthetic oligonucleotide
  Target: ANGPTL4; (-) strand; PAM type: YTN; PAM sequence: TTG
cattatttgtagagacgggg

SEQ ID NO: 14603 - DNA, 20 bp, Artificial Sequence
  Description of Artificial Sequence: Synthetic oligonucleotide
  Target: ANGPTL4; (-) strand; PAM type: YTN; PAM sequence: TTT
gcattatttgtagagacggg

SEQ ID NO: 14604 - DNA, 20 bp, Artificial Sequence
  Description of Artificial Sequence: Synthetic oligonucleotide
  Target: ANGPTL4; (-) strand; PAM type: YTN; PAM sequence: TTT
tgcattatttgtagagacgg

SEQ ID NO: 14605 - DNA, 20 bp, Artificial Sequence
  Description of Artificial Sequence: Synthetic oligonucleotide
  Target: ANGPTL4; (-) strand; PAM type: YTN; PAM sequence: TTT
ttgcattatttgtagagacg

SEQ ID NO: 14606 - DNA, 20 bp, Artificial Sequence
  Description of Artificial Sequence: Synthetic oligonucleotide
  Target: ANGPTL4; (-) strand; PAM type: YTN; PAM sequence: CTA
gtttttgcattatttgtaga

SEQ ID NO: 14607 - DNA, 20 bp, Artificial Sequence
  Description of Artificial Sequence: Synthetic oligonucleotide
  Target: ANGPTL4; (-) strand; PAM type: YTN; PAM sequence: CTA
caggcatgtgccaccacgcc

SEQ ID NO: 14608 - DNA, 20 bp, Artificial Sequence
  Description of Artificial Sequence: Synthetic oligonucleotide
  Target: ANGPTL4; (-) strand; PAM type: YTN; PAM sequence: CTG
ggactacaggcatgtgccac

SEQ ID NO: 14609 - DNA, 20 bp, Artificial Sequence
  Description of Artificial Sequence: Synthetic oligonucleotide
  Target: ANGPTL4; (-) strand; PAM type: YTN; PAM sequence: CTC
cggagcagctgggactacag

SEQ ID NO: 14610 - DNA, 20 bp, Artificial Sequence
  Description of Artificial Sequence: Synthetic oligonucleotide
  Target: ANGPTL4; (-) strand; PAM type: YTN; PAM sequence: CTG
ccgcagcctccggagcagct

SEQ ID NO: 14611 - DNA, 20 bp, Artificial Sequence
  Description of Artificial Sequence: Synthetic oligonucleotide
  Target: ANGPTL4; (-) strand; PAM type: YTN; PAM sequence: TTC
tgccgcagcctccggagcag

SEQ ID NO: 14612 - DNA, 20 bp, Artificial Sequence
  Description of Artificial Sequence: Synthetic oligonucleotide
  Target: ANGPTL4; (-) strand; PAM type: YTN; PAM sequence: TTC
aagcaattctgccgcagcct

SEQ ID NO: 14613 - DNA, 20 bp, Artificial Sequence
  Description of Artificial Sequence: Synthetic oligonucleotide
  Target: ANGPTL4; (-) strand; PAM type: YTN; PAM sequence: CTC
ccaggttcaagcaattctgc

SEQ ID NO: 14614 - DNA, 20 bp, Artificial Sequence
  Description of Artificial Sequence: Synthetic oligonucleotide
  Target: ANGPTL4; (-) strand; PAM type: YTN; PAM sequence: CTC
cgcctcccaggttcaagcaa

SEQ ID NO: 14615 - DNA, 20 bp, Artificial Sequence
  Description of Artificial Sequence: Synthetic oligonucleotide
  Target: ANGPTL4; (-) strand; PAM type: YTN; PAM sequence: CTG
caacctccgcctcccaggtt

SEQ ID NO: 14616 - DNA, 20 bp, Artificial Sequence
  Description of Artificial Sequence: Synthetic oligonucleotide
  Target: ANGPTL4; (-) strand; PAM type: YTN; PAM sequence: CTC
actgcaacctccgcctccca

SEQ ID NO: 14617 - DNA, 20 bp, Artificial Sequence
  Description of Artificial Sequence: Synthetic oligonucleotide
  Target: ANGPTL4; (-) strand; PAM type: YTN; PAM sequence: TTG
gctcactgcaacctccgcct

SEQ ID NO: 14618 - DNA, 20 bp, Artificial Sequence
  Description of Artificial Sequence: Synthetic oligonucleotide
  Target: ANGPTL4; (-) strand; PAM type: YTN; PAM sequence: CTT
ggctcactgcaacctccgcc

SEQ ID NO: 14619 - DNA, 20 bp, Artificial Sequence
  Description of Artificial Sequence: Synthetic oligonucleotide
  Target: ANGPTL4; (-) strand; PAM type: YTN; PAM sequence: CTG
gagtgcagtggcgcaatctt

SEQ ID NO: 14620 - DNA, 20 bp, Artificial Sequence
  Description of Artificial Sequence: Synthetic oligonucleotide
  Target: ANGPTL4; (-) strand; PAM type: YTN; PAM sequence: CTG
tcgccaggctggagtgcagt

SEQ ID NO: 14621 - DNA, 20 bp, Artificial Sequence
  Description of Artificial Sequence: Synthetic oligonucleotide
  Target: ANGPTL4; (-) strand; PAM type: YTN; PAM sequence: CTC
tgtcgccaggctggagtgca

SEQ ID NO: 14622 - DNA, 20 bp, Artificial Sequence
  Description of Artificial Sequence: Synthetic oligonucleotide
  Target: ANGPTL4; (-) strand; PAM type: YTN; PAM sequence: CTC
gctctgtcgccaggctggag

SEQ ID NO: 14623 - DNA, 20 bp, Artificial Sequence
  Description of Artificial Sequence: Synthetic oligonucleotide
  Target: ANGPTL4; (-) strand; PAM type: YTN; PAM sequence: TTG
atacggagtctcgctctgtc

SEQ ID NO: 14624 - DNA, 20 bp, Artificial Sequence
  Description of Artificial Sequence: Synthetic oligonucleotide
  Target: ANGPTL4; (-) strand; PAM type: YTN; PAM sequence: TTT
gatacggagtctcgctctgt

SEQ ID NO: 14625 - DNA, 20 bp, Artificial Sequence
  Description of Artificial Sequence: Synthetic oligonucleotide
  Target: ANGPTL4; (-) strand; PAM type: YTN; PAM sequence: TTT
tgatacggagtctcgctctg

SEQ ID NO: 14626 - DNA, 20 bp, Artificial Sequence
  Description of Artificial Sequence: Synthetic oligonucleotide
  Target: ANGPTL4; (-) strand; PAM type: YTN; PAM sequence: TTT
ttgatacggagtctcgctct

SEQ ID NO: 14627 - DNA, 20 bp, Artificial Sequence
  Description of Artificial Sequence: Synthetic oligonucleotide
  Target: ANGPTL4; (-) strand; PAM type: YTN; PAM sequence: TTT
tttgatacggagtctcgctc

SEQ ID NO: 14628 - DNA, 20 bp, Artificial Sequence
  Description of Artificial Sequence: Synthetic oligonucleotide
  Target: ANGPTL4; (-) strand; PAM type: YTN; PAM sequence: TTG
ttttttgatacggagtctcg

SEQ ID NO: 14629 - DNA, 20 bp, Artificial Sequence
  Description of Artificial Sequence: Synthetic oligonucleotide
  Target: ANGPTL4; (-) strand; PAM type: YTN; PAM sequence: TTT
gttttttgatacggagtctc

SEQ ID NO: 14630 - DNA, 20 bp, Artificial Sequence
  Description of Artificial Sequence: Synthetic oligonucleotide
  Target: ANGPTL4; (-) strand; PAM type: YTN; PAM sequence: TTT
tgttttttgatacggagtct

SEQ ID NO: 14631 - DNA, 20 bp, Artificial Sequence
  Description of Artificial Sequence: Synthetic oligonucleotide
  Target: ANGPTL4; (-) strand; PAM type: YTN; PAM sequence: TTG
ttttgttttttgatacggag

SEQ ID NO: 14632 - DNA, 20 bp, Artificial Sequence
  Description of Artificial Sequence: Synthetic oligonucleotide
  Target: ANGPTL4; (-) strand; PAM type: YTN; PAM sequence: TTT
gttttgttttttgatacgga

SEQ ID NO: 14633 - DNA, 20 bp, Artificial Sequence
  Description of Artificial Sequence: Synthetic oligonucleotide
  Target: ANGPTL4; (-) strand; PAM type: YTN; PAM sequence: TTT
tgttttgttttttgatacgg

SEQ ID NO: 14634 - DNA, 20 bp, Artificial Sequence
  Description of Artificial Sequence: Synthetic oligonucleotide
  Target: ANGPTL4; (-) strand; PAM type: YTN; PAM sequence: TTT
ttgttttgttttttgatacg

SEQ ID NO: 14635 - DNA, 20 bp, Artificial Sequence
  Description of Artificial Sequence: Synthetic oligonucleotide
  Target: ANGPTL4; (-) strand; PAM type: YTN; PAM sequence: TTT
tttgttttgttttttgatac

SEQ ID NO: 14636 - DNA, 20 bp, Artificial Sequence
  Description of Artificial Sequence: Synthetic oligonucleotide
  Target: ANGPTL4; (-) strand; PAM type: YTN; PAM sequence: TTT
ttttgttttgttttttgata

SEQ ID NO: 14637 - DNA, 20 bp, Artificial Sequence
  Description of Artificial Sequence: Synthetic oligonucleotide
  Target: ANGPTL4; (-) strand; PAM type: YTN; PAM sequence: CTT
tttttgttttgttttttgat

SEQ ID NO: 14638 - DNA, 20 bp, Artificial Sequence
  Description of Artificial Sequence: Synthetic oligonucleotide
  Target: ANGPTL4; (-) strand; PAM type: YTN; PAM sequence: CTC
tttttttgttttgttttttg

SEQ ID NO: 14639 - DNA, 20 bp, Artificial Sequence
  Description of Artificial Sequence: Synthetic oligonucleotide
  Target: ANGPTL4; (-) strand; PAM type: YTN; PAM sequence: CTC
tctttttttgttttgttttt

SEQ ID NO: 14640 - DNA, 20 bp, Artificial Sequence
  Description of Artificial Sequence: Synthetic oligonucleotide
  Target: ANGPTL4; (-) strand; PAM type: YTN; PAM sequence: CTG
ggactctctttttttgtttt

SEQ ID NO: 14641 - DNA, 20 bp, Artificial Sequence
  Description of Artificial Sequence: Synthetic oligonucleotide
  Target: ANGPTL4; (-) strand; PAM type: YTN; PAM sequence: CTG
cctgggactctctttttttg

SEQ ID NO: 14642 - DNA, 20 bp, Artificial Sequence
  Description of Artificial Sequence: Synthetic oligonucleotide
  Target: ANGPTL4; (-) strand; PAM type: YTN; PAM sequence: TTC
cccctgcctgggactctctt

SEQ ID NO: 14643 - DNA, 20 bp, Artificial Sequence
  Description of Artificial Sequence: Synthetic oligonucleotide
  Target: ANGPTL4; (-) strand; PAM type: YTN; PAM sequence: CTG
ttccccctgcctgggactct

SEQ ID NO: 14644 - DNA, 20 bp, Artificial Sequence
  Description of Artificial Sequence: Synthetic oligonucleotide
  Target: ANGPTL4; (-) strand; PAM type: YTN; PAM sequence: TTG
cacatgctgttccccctgcc

SEQ ID NO: 14645 - DNA, 20 bp, Artificial Sequence
  Description of Artificial Sequence: Synthetic oligonucleotide
  Target: ANGPTL4; (-) strand; PAM type: YTN; PAM sequence: TTT
gcacatgctgttccccctgc

SEQ ID NO: 14646 - DNA, 20 bp, Artificial Sequence
  Description of Artificial Sequence: Synthetic oligonucleotide
  Target: ANGPTL4; (-) strand; PAM type: YTN; PAM sequence: CTT
tgcacatgctgttccccctg

SEQ ID NO: 14647 - DNA, 20 bp, Artificial Sequence
  Description of Artificial Sequence: Synthetic oligonucleotide
  Target: ANGPTL4; (-) strand; PAM type: YTN; PAM sequence: CTG
ccacagggactttgcacatg

SEQ ID NO: 14648 - DNA, 20 bp, Artificial Sequence
  Description of Artificial Sequence: Synthetic oligonucleotide
  Target: ANGPTL4; (-) strand; PAM type: YTN; PAM sequence: TTG
taccacacaccgtcctgcca

SEQ ID NO: 14649 - DNA, 20 bp, Artificial Sequence
  Description of Artificial Sequence: Synthetic oligonucleotide
  Target: ANGPTL4; (-) strand; PAM type: YTN; PAM sequence: CTT
gtaccacacaccgtcctgcc

SEQ ID NO: 14650 - DNA, 20 bp, Artificial Sequence
  Description of Artificial Sequence: Synthetic oligonucleotide
  Target: ANGPTL4; (-) strand; PAM type: YTN; PAM sequence: TTC
ccacccttgtaccacacacc

SEQ ID NO: 14651 - DNA, 20 bp, Artificial Sequence
  Description of Artificial Sequence: Synthetic oligonucleotide
  Target: ANGPTL4; (-) strand; PAM type: YTN; PAM sequence: CTT
cccacccttgtaccacacac

SEQ ID NO: 14652 - DNA, 20 bp, Artificial Sequence
  Description of Artificial Sequence: Synthetic oligonucleotide
  Target: ANGPTL4; (-) strand; PAM type: YTN; PAM sequence: TTC
ttcccacccttgtaccacac

SEQ ID NO: 14653 - DNA, 20 bp, Artificial Sequence
  Description of Artificial Sequence: Synthetic oligonucleotide
  Target: ANGPTL4; (-) strand; PAM type: YTN; PAM sequence: TTT
cttcccacccttgtaccaca

SEQ ID NO: 14654 - DNA, 20 bp, Artificial Sequence
  Description of Artificial Sequence: Synthetic oligonucleotide
  Target: ANGPTL4; (-) strand; PAM type: YTN; PAM sequence: CTT
tcttcccacccttgtaccac

SEQ ID NO: 14655 - DNA, 20 bp, Artificial Sequence
  Description of Artificial Sequence: Synthetic oligonucleotide
  Target: ANGPTL4; (-) strand; PAM type: YTN; PAM sequence: CTG
gcacacaggctttcttccca

SEQ ID NO: 14656 - DNA, 20 bp, Artificial Sequence
  Description of Artificial Sequence: Synthetic oligonucleotide
  Target: ANGPTL4; (-) strand; PAM type: YTN; PAM sequence: CTC
tggcacacaggctttcttcc

SEQ ID NO: 14657 - DNA, 20 bp, Artificial Sequence
  Description of Artificial Sequence: Synthetic oligonucleotide
  Target: ANGPTL4; (-) strand; PAM type: YTN; PAM sequence: CTC
tctggcacacaggctttctt

SEQ ID NO: 14658 - DNA, 20 bp, Artificial Sequence
  Description of Artificial Sequence: Synthetic oligonucleotide
  Target: ANGPTL4; (-) strand; PAM type: YTN; PAM sequence: CTG
tacccacaccctctctggca

SEQ ID NO: 14659 - DNA, 20 bp, Artificial Sequence
  Description of Artificial Sequence: Synthetic oligonucleotide
  Target: ANGPTL4; (-) strand; PAM type: YTN; PAM sequence: CTG
ccatgctgtacccacaccct

SEQ ID NO: 14660 - DNA, 20 bp, Artificial Sequence
  Description of Artificial Sequence: Synthetic oligonucleotide
  Target: ANGPTL4; (-) strand; PAM type: YTN; PAM sequence: CTC
ctgccatgctgtacccacac

SEQ ID NO: 14661 - DNA, 20 bp, Artificial Sequence
  Description of Artificial Sequence: Synthetic oligonucleotide
  Target: ANGPTL4; (-) strand; PAM type: YTN; PAM sequence: CTC
ctcctgccatgctgtaccca

SEQ ID NO: 14662 - DNA, 20 bp, Artificial Sequence
  Description of Artificial Sequence: Synthetic oligonucleotide
  Target: ANGPTL4; (-) strand; PAM type: YTN; PAM sequence: CTG
gaggaccagcccccgtgccc

SEQ ID NO: 14663 - DNA, 20 bp, Artificial Sequence
  Description of Artificial Sequence: Synthetic oligonucleotide
  Target: ANGPTL4; (-) strand; PAM type: YTN; PAM sequence: CTC
agcatggtccacaaggcacc

SEQ ID NO: 14664 - DNA, 20 bp, Artificial Sequence
  Description of Artificial Sequence: Synthetic oligonucleotide
  Target: ANGPTL4; (-) strand; PAM type: YTN; PAM sequence: TTC
ctcagcatggtccacaaggc

SEQ ID NO: 14665 - DNA, 20 bp, Artificial Sequence
  Description of Artificial Sequence: Synthetic oligonucleotide
  Target: ANGPTL4; (-) strand; PAM type: YTN; PAM sequence: CTT
cctcagcatggtccacaagg

SEQ ID NO: 14666 - DNA, 20 bp, Artificial Sequence
  Description of Artificial Sequence: Synthetic oligonucleotide
  Target: ANGPTL4; (-) strand; PAM type: YTN; PAM sequence: CTA
tgtccttcctcagcatggtc

SEQ ID NO: 14667 - DNA, 20 bp, Artificial Sequence
  Description of Artificial Sequence: Synthetic oligonucleotide
  Target: ANGPTL4; (-) strand; PAM type: YTN; PAM sequence: CTC
cctatgtccttcctcagcat

SEQ ID NO: 14668 - DNA, 20 bp, Artificial Sequence
  Description of Artificial Sequence: Synthetic oligonucleotide
  Target: ANGPTL4; (-) strand; PAM type: YTN; PAM sequence: TTC
catggctccctatgtccttc

SEQ ID NO: 14669 - DNA, 20 bp, Artificial Sequence
  Description of Artificial Sequence: Synthetic oligonucleotide
  Target: ANGPTL4; (-) strand; PAM type: YTN; PAM sequence: CTT
ccatggctccctatgtcctt

SEQ ID NO: 14670 - DNA, 20 bp, Artificial Sequence
  Description of Artificial Sequence: Synthetic oligonucleotide
  Target: ANGPTL4; (-) strand; PAM type: YTN; PAM sequence: CTC
ttccatggctccctatgtcc

SEQ ID NO: 14671 - DNA, 20 bp, Artificial Sequence
  Description of Artificial Sequence: Synthetic oligonucleotide
  Target: ANGPTL4; (-) strand; PAM type: YTN; PAM sequence: CTA
acctcttccatggctcccta

SEQ ID NO: 14672 - DNA, 20 bp, Artificial Sequence
  Description of Artificial Sequence: Synthetic oligonucleotide
  Target: ANGPTL4; (-) strand; PAM type: YTN; PAM sequence: CTG
cctaacctcttccatggctc

SEQ ID NO: 14673 - DNA, 20 bp, Artificial Sequence
  Description of Artificial Sequence: Synthetic oligonucleotide
  Target: ANGPTL4; (-) strand; PAM type: YTN; PAM sequence: CTG
ccatctgcctaacctcttcc

SEQ ID NO: 14674 - DNA, 20 bp, Artificial Sequence
  Description of Artificial Sequence: Synthetic oligonucleotide
  Target: ANGPTL4; (-) strand; PAM type: YTN; PAM sequence: CTC
tgccatctgcctaacctctt

SEQ ID NO: 14675 - DNA, 20 bp, Artificial Sequence
  Description of Artificial Sequence: Synthetic oligonucleotide
  Target: ANGPTL4; (-) strand; PAM type: YTN; PAM sequence: CTC
tctgccatctgcctaacctc

SEQ ID NO: 14676 - DNA, 20 bp, Artificial Sequence
  Description of Artificial Sequence: Synthetic oligonucleotide
  Target: ANGPTL4; (-) strand; PAM type: YTN; PAM sequence: CTC
atgaccacctctctgccatc

SEQ ID NO: 14677 - DNA, 20 bp, Artificial Sequence
  Description of Artificial Sequence: Synthetic oligonucleotide
  Target: ANGPTL4; (-) strand; PAM type: YTN; PAM sequence: TTA
tctcatgaccacctctctgc

SEQ ID NO: 14678 - DNA, 20 bp, Artificial Sequence
  Description of Artificial Sequence: Synthetic oligonucleotide
  Target: ANGPTL4; (-) strand; PAM type: YTN; PAM sequence: CTT
atctcatgaccacctctctg

SEQ ID NO: 14679 - DNA, 20 bp, Artificial Sequence
  Description of Artificial Sequence: Synthetic oligonucleotide
  Target: ANGPTL4; (-) strand; PAM type: YTN; PAM sequence: TTA
acagtggatgaccagggaag

SEQ ID NO: 14680 - DNA, 20 bp, Artificial Sequence
  Description of Artificial Sequence: Synthetic oligonucleotide
  Target: ANGPTL4; (-) strand; PAM type: YTN; PAM sequence: CTT
aacagtggatgaccagggaa

SEQ ID NO: 14681 - DNA, 20 bp, Artificial Sequence
  Description of Artificial Sequence: Synthetic oligonucleotide
  Target: ANGPTL4; (-) strand; PAM type: YTN; PAM sequence: CTG
ggggcttaacagtggatgac

SEQ ID NO: 14682 - DNA, 20 bp, Artificial Sequence
  Description of Artificial Sequence: Synthetic oligonucleotide
  Target: ANGPTL4; (-) strand; PAM type: YTN; PAM sequence: CTC
aggagccaggcatatctggg

SEQ ID NO: 14683 - DNA, 20 bp, Artificial Sequence
  Description of Artificial Sequence: Synthetic oligonucleotide
  Target: ANGPTL4; (-) strand; PAM type: YTN; PAM sequence: CTG
gggggggtctcaggagccag

SEQ ID NO: 14684 - DNA, 20 bp, Artificial Sequence
  Description of Artificial Sequence: Synthetic oligonucleotide
  Target: ANGPTL4; (-) strand; PAM type: YTN; PAM sequence: TTG
aaacaggagggcagcccctg

SEQ ID NO: 14685 - DNA, 20 bp, Artificial Sequence
  Description of Artificial Sequence: Synthetic oligonucleotide
  Target: ANGPTL4; (-) strand; PAM type: YTN; PAM sequence: CTT
gaaacaggagggcagcccct

SEQ ID NO: 14686 - DNA, 20 bp, Artificial Sequence
  Description of Artificial Sequence: Synthetic oligonucleotide
  Target: ANGPTL4; (-) strand; PAM type: YTN; PAM sequence: CTG
aagggagataaagtggagac

SEQ ID NO: 14687 - DNA, 20 bp, Artificial Sequence
  Description of Artificial Sequence: Synthetic oligonucleotide
  Target: ANGPTL4; (-) strand; PAM type: YTN; PAM sequence: CTG
ggcagccctgaagggagata

SEQ ID NO: 14688 - DNA, 20 bp, Artificial Sequence
  Description of Artificial Sequence: Synthetic oligonucleotide
  Target: ANGPTL4; (-) strand; PAM type: YTN; PAM sequence: CTG
gcaatccctgggcagccctg

SEQ ID NO: 14689 - DNA, 20 bp, Artificial Sequence
  Description of Artificial Sequence: Synthetic oligonucleotide
  Target: ANGPTL4; (-) strand; PAM type: YTN; PAM sequence: CTC
ctggcaatccctgggcagcc

SEQ ID NO: 14690 - DNA, 20 bp, Artificial Sequence
  Description of Artificial Sequence: Synthetic oligonucleotide
  Target: ANGPTL4; (-) strand; PAM type: YTN; PAM sequence: CTG
gaacagctcctggcaatccc

SEQ ID NO: 14691 - DNA, 20 bp, Artificial Sequence
  Description of Artificial Sequence: Synthetic oligonucleotide
  Target: ANGPTL4; (-) strand; PAM type: YTN; PAM sequence: CTC
cccaacctggaacagctcct

SEQ ID NO: 14692 - DNA, 20 bp, Artificial Sequence
  Description of Artificial Sequence: Synthetic oligonucleotide
  Target: ANGPTL4; (-) strand; PAM type: YTN; PAM sequence: CTC
tccccaacctggaacagctc

SEQ ID NO: 14693 - DNA, 20 bp, Artificial Sequence
  Description of Artificial Sequence: Synthetic oligonucleotide
  Target: ANGPTL4; (-) strand; PAM type: YTN; PAM sequence: CTG
cctctccccaacctggaaca

SEQ ID NO: 14694 - DNA, 20 bp, Artificial Sequence
  Description of Artificial Sequence: Synthetic oligonucleotide
  Target: ANGPTL4; (-) strand; PAM type: YTN; PAM sequence: CTC
tgcctctccccaacctggaa

SEQ ID NO: 14695 - DNA, 20 bp, Artificial Sequence
  Description of Artificial Sequence: Synthetic oligonucleotide
  Target: ANGPTL4; (-) strand; PAM type: YTN; PAM sequence: TTC
aaatagtccactctgcctct

SEQ ID NO: 14696 - DNA, 20 bp, Artificial Sequence
  Description of Artificial Sequence: Synthetic oligonucleotide
  Target: ANGPTL4; (-) strand; PAM type: YTN; PAM sequence: TTT
caaatagtccactctgcctc

SEQ ID NO: 14697 - DNA, 20 bp, Artificial Sequence
  Description of Artificial Sequence: Synthetic oligonucleotide
  Target: ANGPTL4; (-) strand; PAM type: YTN; PAM sequence: CTG
gatttcaaatagtccactct

SEQ ID NO: 14698 - DNA, 20 bp, Artificial Sequence
  Description of Artificial Sequence: Synthetic oligonucleotide
  Target: ANGPTL4; (-) strand; PAM type: YTN; PAM sequence: CTG
aggctggatttcaaatagtc

SEQ ID NO: 14699 - DNA, 20 bp, Artificial Sequence
  Description of Artificial Sequence: Synthetic oligonucleotide
  Target: ANGPTL4; (-) strand; PAM type: YTN; PAM sequence: TTC
accaaaaatggcggagaccc

SEQ ID NO: 14700 - DNA, 20 bp, Artificial Sequence
  Description of Artificial Sequence: Synthetic oligonucleotide
  Target: ANGPTL4; (-) strand; PAM type: YTN; PAM sequence: TTG
cagttcaccaaaaatggcgg

SEQ ID NO: 14701 - DNA, 20 bp, Artificial Sequence
  Description of Artificial Sequence: Synthetic oligonucleotide
  Target: ANGPTL4; (-) strand; PAM type: YTN; PAM sequence: CTT
gcagttcaccaaaaatggcg

SEQ ID NO: 14702 - DNA, 20 bp, Artificial Sequence
  Description of Artificial Sequence: Synthetic oligonucleotide
  Target: ANGPTL4; (-) strand; PAM type: YTN; PAM sequence: CTG
aggtcatcttgcagttcacc

SEQ ID NO: 14703 - DNA, 20 bp, Artificial Sequence
  Description of Artificial Sequence: Synthetic oligonucleotide
  Target: ANGPTL4; (-) strand; PAM type: YTN; PAM sequence: CTA
cctgaggtcatcttgcagtt

SEQ ID NO: 14704 - DNA, 20 bp, Artificial Sequence
  Description of Artificial Sequence: Synthetic oligonucleotide
  Target: ANGPTL4; (-) strand; PAM type: YTN; PAM sequence: CTA
acacaccctacctgaggtca

SEQ ID NO: 14705 - DNA, 20 bp, Artificial Sequence
  Description of Artificial Sequence: Synthetic oligonucleotide
  Target: ANGPTL4; (-) strand; PAM type: YTN; PAM sequence: CTG
gtggactaacacaccctacc

SEQ ID NO: 14706 - DNA, 20 bp, Artificial Sequence
  Description of Artificial Sequence: Synthetic oligonucleotide
  Target: ANGPTL4; (-) strand; PAM type: YTN; PAM sequence: CTA
tggggagaggggcccctggt

SEQ ID NO: 14707 - DNA, 20 bp, Artificial Sequence
  Description of Artificial Sequence: Synthetic oligonucleotide
  Target: ANGPTL4; (-) strand; PAM type: YTN; PAM sequence: TTA
aagaaagacaacagggccta

SEQ ID NO: 14708 - DNA, 20 bp, Artificial Sequence
  Description of Artificial Sequence: Synthetic oligonucleotide
  Target: ANGPTL4; (-) strand; PAM type: YTN; PAM sequence: TTT
aaagaaagacaacagggcct

SEQ ID NO: 14709 - DNA, 20 bp, Artificial Sequence
  Description of Artificial Sequence: Synthetic oligonucleotide
  Target: ANGPTL4; (-) strand; PAM type: YTN; PAM sequence: TTC
aatttaaagaaagacaacag

SEQ ID NO: 14710 - DNA, 20 bp, Artificial Sequence
  Description of Artificial Sequence: Synthetic oligonucleotide
  Target: ANGPTL4; (-) strand; PAM type: YTN; PAM sequence: TTT
caatttaaagaaagacaaca

SEQ ID NO: 14711 - DNA, 20 bp, Artificial Sequence
  Description of Artificial Sequence: Synthetic oligonucleotide
  Target: ANGPTL4; (-) strand; PAM type: YTN; PAM sequence: TTT
tcaatttaaagaaagacaac

SEQ ID NO: 14712 - DNA, 20 bp, Artificial Sequence
  Description of Artificial Sequence: Synthetic oligonucleotide
  Target: ANGPTL4; (-) strand; PAM type: YTN; PAM sequence: TTG
ttttcaatttaaagaaagac

SEQ ID NO: 14713 - DNA, 20 bp, Artificial Sequence
  Description of Artificial Sequence: Synthetic oligonucleotide
  Target: ANGPTL4; (-) strand; PAM type: YTN; PAM sequence: TTT
gttttcaatttaaagaaaga

SEQ ID NO: 14714 - DNA, 20 bp, Artificial Sequence
  Description of Artificial Sequence: Synthetic oligonucleotide
  Target: ANGPTL4; (-) strand; PAM type: YTN; PAM sequence: TTT
tgttttcaatttaaagaaag

SEQ ID NO: 14715 - DNA, 20 bp, Artificial Sequence
  Description of Artificial Sequence: Synthetic oligonucleotide
  Target: ANGPTL4; (-) strand; PAM type: YTN; PAM sequence: TTG
ttttgttttcaatttaaaga

SEQ ID NO: 14716 - DNA, 20 bp, Artificial Sequence
  Description of Artificial Sequence: Synthetic oligonucleotide
  Target: ANGPTL4; (-) strand; PAM type: YTN; PAM sequence: TTT
gttttgttttcaatttaaag

SEQ ID NO: 14717 - DNA, 20 bp, Artificial Sequence
  Description of Artificial Sequence: Synthetic oligonucleotide
  Target: ANGPTL4; (-) strand; PAM type: YTN; PAM sequence: TTT
tgttttgttttcaatttaaa

SEQ ID NO: 14718 - DNA, 20 bp, Artificial Sequence
  Description of Artificial Sequence: Synthetic oligonucleotide
  Target: ANGPTL4; (-) strand; PAM type: YTN; PAM sequence: TTG
ttttgttttgttttcaattt

SEQ ID NO: 14719 - DNA, 20 bp, Artificial Sequence
  Description of Artificial Sequence: Synthetic oligonucleotide
  Target: ANGPTL4; (-) strand; PAM type: YTN; PAM sequence: TTT
gttttgttttgttttcaatt

SEQ ID NO: 14720 - DNA, 20 bp, Artificial Sequence
  Description of Artificial Sequence: Synthetic oligonucleotide
  Target: ANGPTL4; (-) strand; PAM type: YTN; PAM sequence: TTT
tgttttgttttgttttcaat

SEQ ID NO: 14721 - DNA, 20 bp, Artificial Sequence
  Description of Artificial Sequence: Synthetic oligonucleotide
  Target: ANGPTL4; (-) strand; PAM type: YTN; PAM sequence: TTT
ttgttttgttttgttttcaa

SEQ ID NO: 14722 - DNA, 20 bp, Artificial Sequence
  Description of Artificial Sequence: Synthetic oligonucleotide
  Target: ANGPTL4; (-) strand; PAM type: YTN; PAM sequence: TTT
tttgttttgttttgttttca

SEQ ID NO: 14723 - DNA, 20 bp, Artificial Sequence
  Description of Artificial Sequence: Synthetic oligonucleotide
  Target: ANGPTL4; (-) strand; PAM type: YTN; PAM sequence: TTT
ttttgttttgttttgttttc

SEQ ID NO: 14724 - DNA, 20 bp, Artificial Sequence
  Description of Artificial Sequence: Synthetic oligonucleotide
  Target: ANGPTL4; (-) strand; PAM type: YTN; PAM sequence: TTA
atttttttgttttgttttgt

SEQ ID NO: 14725 - DNA, 20 bp, Artificial Sequence
  Description of Artificial Sequence: Synthetic oligonucleotide
  Target: ANGPTL4; (-) strand; PAM type: YTN; PAM sequence: TTT
aatttttttgttttgttttg

SEQ ID NO: 14726 - DNA, 20 bp, Artificial Sequence
  Description of Artificial Sequence: Synthetic oligonucleotide
  Target: ANGPTL4; (-) strand; PAM type: YTN; PAM sequence: CTT
taatttttttgttttgtttt

SEQ ID NO: 14727 - DNA, 20 bp, Artificial Sequence
  Description of Artificial Sequence: Synthetic oligonucleotide
  Target: ANGPTL4; (-) strand; PAM type: YTN; PAM sequence: CTG
cctttaatttttttgttttg

SEQ ID NO: 14728 - DNA, 20 bp, Artificial Sequence
  Description of Artificial Sequence: Synthetic oligonucleotide
  Target: ANGPTL4; (-) strand; PAM type: YTN; PAM sequence: TTG
ggcaacatagcaagaccctg

SEQ ID NO: 14729 - DNA, 20 bp, Artificial Sequence
  Description of Artificial Sequence: Synthetic oligonucleotide
  Target: ANGPTL4; (-) strand; PAM type: YTN; PAM sequence: CTT
gggcaacatagcaagaccct

SEQ ID NO: 14730 - DNA, 20 bp, Artificial Sequence
  Description of Artificial Sequence: Synthetic oligonucleotide
  Target: ANGPTL4; (-) strand; PAM type: YTN; PAM sequence: CTC
aaaaaaaaaaaaaaaaaaaa

SEQ ID NO: 14731 - DNA, 20 bp, Artificial Sequence
  Description of Artificial Sequence: Synthetic oligonucleotide
  Target: ANGPTL4; (-) strand; PAM type: YTN; PAM sequence: CTC
catctcaaaaaaaaaaaaaa

SEQ ID NO: 14732 - DNA, 20 bp, Artificial Sequence
  Description of Artificial Sequence: Synthetic oligonucleotide
  Target: ANGPTL4; (-) strand; PAM type: YTN; PAM sequence: CTC
caagagcaaaactccatctc

SEQ ID NO: 14733 - DNA, 20 bp, Artificial Sequence
  Description of Artificial Sequence: Synthetic oligonucleotide
  Target: ANGPTL4; (-) strand; PAM type: YTN; PAM sequence: CTC
cagctccaagagcaaaactc

SEQ ID NO: 14734 - DNA, 20 bp, Artificial Sequence
  Description of Artificial Sequence: Synthetic oligonucleotide
  Target: ANGPTL4; (-) strand; PAM type: YTN; PAM sequence: TTG
cactccagctccaagagcaa

SEQ ID NO: 14735 - DNA, 20 bp, Artificial Sequence
  Description of Artificial Sequence: Synthetic oligonucleotide
  Target: ANGPTL4; (-) strand; PAM type: YTN; PAM sequence: CTG
agatcgtggcattgcactcc

SEQ ID NO: 14736 - DNA, 20 bp, Artificial Sequence
  Description of Artificial Sequence: Synthetic oligonucleotide
  Target: ANGPTL4; (-) strand; PAM type: YTN; PAM sequence: TTC
agtgagctgagatcgtggca

SEQ ID NO: 14737 - DNA, 20 bp, Artificial Sequence
  Description of Artificial Sequence: Synthetic oligonucleotide
  Target: ANGPTL4; (-) strand; PAM type: YTN; PAM sequence: TTT
cagtgagctgagatcgtggc

SEQ ID NO: 14738 - DNA, 20 bp, Artificial Sequence
  Description of Artificial Sequence: Synthetic oligonucleotide
  Target: ANGPTL4; (-) strand; PAM type: YTN; PAM sequence: TTG
aacccgggaggcggaggttt

SEQ ID NO: 14739 - DNA, 20 bp, Artificial Sequence
  Description of Artificial Sequence: Synthetic oligonucleotide
  Target: ANGPTL4; (-) strand; PAM type: YTN; PAM sequence: CTT
gaacccgggaggcggaggtt

SEQ ID NO: 14740 - DNA, 20 bp, Artificial Sequence
  Description of Artificial Sequence: Synthetic oligonucleotide
  Target: ANGPTL4; (-) strand; PAM type: YTN; PAM sequence: TTG
cttgaacccgggaggcggag

SEQ ID NO: 14741 - DNA, 20 bp, Artificial Sequence
  Description of Artificial Sequence: Synthetic oligonucleotide
  Target: ANGPTL4; (-) strand; PAM type: YTN; PAM sequence: CTG
gagaattgcttgaacccggg

SEQ ID NO: 14742 - DNA, 20 bp, Artificial Sequence
  Description of Artificial Sequence: Synthetic oligonucleotide
  Target: ANGPTL4; (-) strand; PAM type: YTN; PAM sequence: CTG
acgctggagaattgcttgaa

SEQ ID NO: 14743 - DNA, 20 bp, Artificial Sequence
  Description of Artificial Sequence: Synthetic oligonucleotide
  Target: ANGPTL4; (-) strand; PAM type: YTN; PAM sequence: CTG
gggaggctgacgctggagaa

SEQ ID NO: 14744 - DNA, 20 bp, Artificial Sequence
  Description of Artificial Sequence: Synthetic oligonucleotide
  Target: ANGPTL4; (-) strand; PAM type: YTN; PAM sequence: CTA
ctggggaggctgacgctgga

SEQ ID NO: 14745 - DNA, 20 bp, Artificial Sequence
  Description of Artificial Sequence: Synthetic oligonucleotide
  Target: ANGPTL4; (-) strand; PAM type: YTN; PAM sequence: CTC
agctactggggaggctgacg

SEQ ID NO: 14746 - DNA, 20 bp, Artificial Sequence
  Description of Artificial Sequence: Synthetic oligonucleotide
  Target: ANGPTL4; (-) strand; PAM type: YTN; PAM sequence: CTG
tagtctcagctactggggag

SEQ ID NO: 14747 - DNA, 20 bp, Artificial Sequence
  Description of Artificial Sequence: Synthetic oligonucleotide
  Target: ANGPTL4; (-) strand; PAM type: YTN; PAM sequence: CTC
gcacctgtagtctcagctac

SEQ ID NO: 14748 - DNA, 20 bp, Artificial Sequence
  Description of Artificial Sequence: Synthetic oligonucleotide
  Target: ANGPTL4; (-) strand; PAM type: YTN; PAM sequence: TTG
ctcgcacctgtagtctcagc

SEQ ID NO: 14749 - DNA, 20 bp, Artificial Sequence
  Description of Artificial Sequence: Synthetic oligonucleotide
  Target: ANGPTL4; (-) strand; PAM type: YTN; PAM sequence: CTG
ggtgtggttgctcgcacctg

SEQ ID NO: 14750 - DNA, 20 bp, Artificial Sequence
  Description of Artificial Sequence: Synthetic oligonucleotide
  Target: ANGPTL4; (-) strand; PAM type: YTN; PAM sequence: TTA
gctgggtgtggttgctcgca

SEQ ID NO: 14751 - DNA, 20 bp, Artificial Sequence
  Description of Artificial Sequence: Synthetic oligonucleotide
  Target: ANGPTL4; (-) strand; PAM type: YTN; PAM sequence: CTA
aaaatacaaaaattagctgg

SEQ ID NO: 14752 - DNA, 20 bp, Artificial Sequence
  Description of Artificial Sequence: Synthetic oligonucleotide
  Target: ANGPTL4; (-) strand; PAM type: YTN; PAM sequence: CTA
ctaaaaatacaaaaattagc

SEQ ID NO: 14753 - DNA, 20 bp, Artificial Sequence
  Description of Artificial Sequence: Synthetic oligonucleotide
  Target: ANGPTL4; (-) strand; PAM type: YTN; PAM sequence: CTC
tactaaaaatacaaaaatta

SEQ ID NO: 14754 - DNA, 20 bp, Artificial Sequence
  Description of Artificial Sequence: Synthetic oligonucleotide
  Target: ANGPTL4; (-) strand; PAM type: YTN; PAM sequence: TTG
agaccagccagaccaacatg

SEQ ID NO: 14755 - DNA, 20 bp, Artificial Sequence
  Description of Artificial Sequence: Synthetic oligonucleotide
  Target: ANGPTL4; (-) strand; PAM type: YTN; PAM sequence: TTT
gagaccagccagaccaacat

SEQ ID NO: 14756 - DNA, 20 bp, Artificial Sequence
  Description of Artificial Sequence: Synthetic oligonucleotide
  Target: ANGPTL4; (-) strand; PAM type: YTN; PAM sequence: TTG
aggtcaggagtttgagacca

SEQ ID NO: 14757 - DNA, 20 bp, Artificial Sequence
  Description of Artificial Sequence: Synthetic oligonucleotide
  Target: ANGPTL4; (-) strand; PAM type: YTN; PAM sequence: TTT
gaggtcaggagtttgagacc

SEQ ID NO: 14758 - DNA, 20 bp, Artificial Sequence
  Description of Artificial Sequence: Synthetic oligonucleotide
  Target: ANGPTL4; (-) strand; PAM type: YTN; PAM sequence: TTG
ggaggccaaagtcggcaaat

SEQ ID NO: 14759 - DNA, 20 bp, Artificial Sequence
  Description of Artificial Sequence: Synthetic oligonucleotide
  Target: ANGPTL4; (-) strand; PAM type: YTN; PAM sequence: TTT
gggaggccaaagtcggcaaa

SEQ ID NO: 14760 - DNA, 20 bp, Artificial Sequence
  Description of Artificial Sequence: Synthetic oligonucleotide
  Target: ANGPTL4; (-) strand; PAM type: YTN; PAM sequence: TTT
tgggaggccaaagtcggcaa

SEQ ID NO: 14761 - DNA, 20 bp, Artificial Sequence
  Description of Artificial Sequence: Synthetic oligonucleotide
  Target: ANGPTL4; (-) strand; PAM type: YTN; PAM sequence: CTA
taatcccagcattttgggag

SEQ ID NO: 14762 - DNA, 20 bp, Artificial Sequence
  Description of Artificial Sequence: Synthetic oligonucleotide
  Target: ANGPTL4; (-) strand; PAM type: YTN; PAM sequence: CTA
atgcctataatcccagcatt

SEQ ID NO: 14763 - DNA, 20 bp, Artificial Sequence
  Description of Artificial Sequence: Synthetic oligonucleotide
  Target: ANGPTL4; (-) strand; PAM type: YTN; PAM sequence: TTA
aagaaaagaggccaggagca

SEQ ID NO: 14764 - DNA, 20 bp, Artificial Sequence
  Description of Artificial Sequence: Synthetic oligonucleotide
  Target: ANGPTL4; (-) strand; PAM type: YTN; PAM sequence: TTT
aaagaaaagaggccaggagc

SEQ ID NO: 14765 - DNA, 20 bp, Artificial Sequence
  Description of Artificial Sequence: Synthetic oligonucleotide
  Target: ANGPTL4; (-) strand; PAM type: YTN; PAM sequence: TTT
taaagaaaagaggccaggag

SEQ ID NO: 14766 - DNA, 20 bp, Artificial Sequence
  Description of Artificial Sequence: Synthetic oligonucleotide
  Target: ANGPTL4; (-) strand; PAM type: YTN; PAM sequence: CTG
cattttaaagaaaagaggcc

SEQ ID NO: 14767 - DNA, 20 bp, Artificial Sequence
  Description of Artificial Sequence: Synthetic oligonucleotide
  Target: ANGPTL4; (-) strand; PAM type: YTN; PAM sequence: CTA
cacccagacaagggctgcat

SEQ ID NO: 14768 - DNA, 20 bp, Artificial Sequence
  Description of Artificial Sequence: Synthetic oligonucleotide
  Target: ANGPTL4; (-) strand; PAM type: YTN; PAM sequence: TTA
cagatatgagccactacacc

SEQ ID NO: 14769 - DNA, 20 bp, Artificial Sequence
  Description of Artificial Sequence: Synthetic oligonucleotide
  Target: ANGPTL4; (-) strand; PAM type: YTN; PAM sequence: CTC
ccaaagtgtcgggattacag

SEQ ID NO: 14770 - DNA, 20 bp, Artificial Sequence
  Description of Artificial Sequence: Synthetic oligonucleotide
  Target: ANGPTL4; (-) strand; PAM type: YTN; PAM sequence: CTC
atgataggcctcccaaagtg

SEQ ID NO: 14771 - DNA, 20 bp, Artificial Sequence
  Description of Artificial Sequence: Synthetic oligonucleotide
  Target: ANGPTL4; (-) strand; PAM type: YTN; PAM sequence: CTC
aagtgatcctcatgataggc

SEQ ID NO: 14772 - DNA, 20 bp, Artificial Sequence
  Description of Artificial Sequence: Synthetic oligonucleotide
  Target: ANGPTL4; (-) strand; PAM type: YTN; PAM sequence: CTG
ggctcaagtgatcctcatga

SEQ ID NO: 14773 - DNA, 20 bp, Artificial Sequence
  Description of Artificial Sequence: Synthetic oligonucleotide
  Target: ANGPTL4; (-) strand; PAM type: YTN; PAM sequence: TTC
tgggctcaagtgatcctcat

SEQ ID NO: 14774 - DNA, 20 bp, Artificial Sequence
  Description of Artificial Sequence: Synthetic oligonucleotide
  Target: ANGPTL4; (-) strand; PAM type: YTN; PAM sequence: CTT
ctgggctcaagtgatcctca

SEQ ID NO: 14775 - DNA, 20 bp, Artificial Sequence
  Description of Artificial Sequence: Synthetic oligonucleotide
  Target: ANGPTL4; (-) strand; PAM type: YTN; PAM sequence: CTC
gaacttctgggctcaagtga

SEQ ID NO: 14776 - DNA, 20 bp, Artificial Sequence
  Description of Artificial Sequence: Synthetic oligonucleotide
  Target: ANGPTL4; (-) strand; PAM type: YTN; PAM sequence: CTG
gtctcgaacttctgggctca

SEQ ID NO: 14777 - DNA, 20 bp, Artificial Sequence
  Description of Artificial Sequence: Synthetic oligonucleotide
  Target: ANGPTL4; (-) strand; PAM type: YTN; PAM sequence: TTG
tccaggctggtctcgaactt

SEQ ID NO: 14778 - DNA, 20 bp, Artificial Sequence
  Description of Artificial Sequence: Synthetic oligonucleotide
  Target: ANGPTL4; (-) strand; PAM type: YTN; PAM sequence: CTA
tgttgtccaggctggtctcg

SEQ ID NO: 14779 - DNA, 20 bp, Artificial Sequence
  Description of Artificial Sequence: Synthetic oligonucleotide
  Target: ANGPTL4; (-) strand; PAM type: YTN; PAM sequence: CTC
actatgttgtccaggctggt

SEQ ID NO: 14780 - DNA, 20 bp, Artificial Sequence
  Description of Artificial Sequence: Synthetic oligonucleotide
  Target: ANGPTL4; (-) strand; PAM type: YTN; PAM sequence: CTC
tcactatgttgtccaggctg

SEQ ID NO: 14781 - DNA, 20 bp, Artificial Sequence
  Description of Artificial Sequence: Synthetic oligonucleotide
  Target: ANGPTL4; (-) strand; PAM type: YTN; PAM sequence: TTG
taaagatgagctctcactat

SEQ ID NO: 14782 - DNA, 20 bp, Artificial Sequence
  Description of Artificial Sequence: Synthetic oligonucleotide
  Target: ANGPTL4; (-) strand; PAM type: YTN; PAM sequence: TTT
gtaaagatgagctctcacta

SEQ ID NO: 14783 - DNA, 20 bp, Artificial Sequence
  Description of Artificial Sequence: Synthetic oligonucleotide
  Target: ANGPTL4; (-) strand; PAM type: YTN; PAM sequence: TTT
tgtaaagatgagctctcact

SEQ ID NO: 14784 - DNA, 20 bp, Artificial Sequence
  Description of Artificial Sequence: Synthetic oligonucleotide
  Target: ANGPTL4; (-) strand; PAM type: YTN; PAM sequence: TTT
ttgtaaagatgagctctcac

SEQ ID NO: 14785 - DNA, 20 bp, Artificial Sequence
  Description of Artificial Sequence: Synthetic oligonucleotide
  Target: ANGPTL4; (-) strand; PAM type: YTN; PAM sequence: TTT
tttgtaaagatgagctctca

SEQ ID NO: 14786 - DNA, 20 bp, Artificial Sequence
  Description of Artificial Sequence: Synthetic oligonucleotide
  Target: ANGPTL4; (-) strand; PAM type: YTN; PAM sequence: TTA
caaaattttttgtaaagatg

SEQ ID NO: 14787 - DNA, 20 bp, Artificial Sequence
  Description of Artificial Sequence: Synthetic oligonucleotide
  Target: ANGPTL4; (-) strand; PAM type: YTN; PAM sequence: TTT
acaaaattttttgtaaagat

SEQ ID NO: 14788 - DNA, 20 bp, Artificial Sequence
  Description of Artificial Sequence: Synthetic oligonucleotide
  Target: ANGPTL4; (-) strand; PAM type: YTN; PAM sequence: TTT
tacaaaattttttgtaaaga

SEQ ID NO: 14789 - DNA, 20 bp, Artificial Sequence
  Description of Artificial Sequence: Synthetic oligonucleotide
  Target: ANGPTL4; (-) strand; PAM type: YTN; PAM sequence: CTT
ttacaaaattttttgtaaag

SEQ ID NO: 14790 - DNA, 20 bp, Artificial Sequence
  Description of Artificial Sequence: Synthetic oligonucleotide
  Target: ANGPTL4; (-) strand; PAM type: YTN; PAM sequence: TTA
cttttacaaaattttttgta

SEQ ID NO: 14791 - DNA, 20 bp, Artificial Sequence
  Description of Artificial Sequence: Synthetic oligonucleotide
  Target: ANGPTL4; (-) strand; PAM type: YTN; PAM sequence: TTT
acttttacaaaattttttgt

SEQ ID NO: 14792 - DNA, 20 bp, Artificial Sequence
  Description of Artificial Sequence: Synthetic oligonucleotide
  Target: ANGPTL4; (-) strand; PAM type: YTN; PAM sequence: TTT
tacttttacaaaattttttg

SEQ ID NO: 14793 - DNA, 20 bp, Artificial Sequence
  Description of Artificial Sequence: Synthetic oligonucleotide
  Target: ANGPTL4; (-) strand; PAM type: YTN; PAM sequence: TTT
ttacttttacaaaatttttt

SEQ ID NO: 14794 - DNA, 20 bp, Artificial Sequence
  Description of Artificial Sequence: Synthetic oligonucleotide
  Target: ANGPTL4; (-) strand; PAM type: YTN; PAM sequence: TTT
tttacttttacaaaattttt

SEQ ID NO: 14795 - DNA, 20 bp, Artificial Sequence
  Description of Artificial Sequence: Synthetic oligonucleotide
  Target: ANGPTL4; (-) strand; PAM type: YTN; PAM sequence: TTT
ttttacttttacaaaatttt

SEQ ID NO: 14796 - DNA, 20 bp, Artificial Sequence
  Description of Artificial Sequence: Synthetic oligonucleotide
  Target: ANGPTL4; (-) strand; PAM type: YTN; PAM sequence: TTT
tttttacttttacaaaattt

SEQ ID NO: 14797 - DNA, 20 bp, Artificial Sequence
  Description of Artificial Sequence: Synthetic oligonucleotide
  Target: ANGPTL4; (-) strand; PAM type: YTN; PAM sequence: TTT
ttttttacttttacaaaatt

SEQ ID NO: 14798 - DNA, 20 bp, Artificial Sequence
  Description of Artificial Sequence: Synthetic oligonucleotide
  Target: ANGPTL4; (-) strand; PAM type: YTN; PAM sequence: CTT
tttttttacttttacaaaat

SEQ ID NO: 14799 - DNA, 20 bp, Artificial Sequence
  Description of Artificial Sequence: Synthetic oligonucleotide
  Target: ANGPTL4; (-) strand; PAM type: YTN; PAM sequence: TTG
gcctttttttttacttttac

SEQ ID NO: 14800 - DNA, 20 bp, Artificial Sequence
  Description of Artificial Sequence: Synthetic oligonucleotide
  Target: ANGPTL4; (-) strand; PAM type: YTN; PAM sequence: CTT
ggcctttttttttactttta

SEQ ID NO: 14801 - DNA, 20 bp, Artificial Sequence
  Description of Artificial Sequence: Synthetic oligonucleotide
  Target: ANGPTL4; (-) strand; PAM type: YTN; PAM sequence: CTG
cacttggcctttttttttac

SEQ ID NO: 14802 - DNA, 20 bp, Artificial Sequence
  Description of Artificial Sequence: Synthetic oligonucleotide
  Target: ANGPTL4; (-) strand; PAM type: YTN; PAM sequence: TTA
caggtgtgagccactgcact

SEQ ID NO: 14803 - DNA, 20 bp, Artificial Sequence
  Description of Artificial Sequence: Synthetic oligonucleotide
  Target: ANGPTL4; (-) strand; PAM type: YTN; PAM sequence: CTG
ggattacaggtgtgagccac

SEQ ID NO: 14804 - DNA, 20 bp, Artificial Sequence
  Description of Artificial Sequence: Synthetic oligonucleotide
  Target: ANGPTL4; (-) strand; PAM type: YTN; PAM sequence: CTC
ccaaagtgctgggattacag

SEQ ID NO: 14805 - DNA, 20 bp, Artificial Sequence
  Description of Artificial Sequence: Synthetic oligonucleotide
  Target: ANGPTL4; (-) strand; PAM type: YTN; PAM sequence: CTC
aacctcccaaagtgctggga

SEQ ID NO: 14806 - DNA, 20 bp, Artificial Sequence
  Description of Artificial Sequence: Synthetic oligonucleotide
  Target: ANGPTL4; (-) strand; PAM type: YTN; PAM sequence: CTG
cctcaacctcccaaagtgct

SEQ ID NO: 14807 - DNA, 20 bp, Artificial Sequence
  Description of Artificial Sequence: Synthetic oligonucleotide
  Target: ANGPTL4; (-) strand; PAM type: YTN; PAM sequence: CTG
tctgcctcaacctcccaaag

SEQ ID NO: 14808 - DNA, 20 bp, Artificial Sequence
  Description of Artificial Sequence: Synthetic oligonucleotide
  Target: ANGPTL4; (-) strand; PAM type: YTN; PAM sequence: CTC
gtgatctgtctgcctcaacc

SEQ ID NO: 14809 - DNA, 20 bp, Artificial Sequence
  Description of Artificial Sequence: Synthetic oligonucleotide
  Target: ANGPTL4; (-) strand; PAM type: YTN; PAM sequence: CTG
acctcgtgatctgtctgcct

SEQ ID NO: 14810 - DNA, 20 bp, Artificial Sequence
  Description of Artificial Sequence: Synthetic oligonucleotide
  Target: ANGPTL4; (-) strand; PAM type: YTN; PAM sequence: CTC
ctgacctcgtgatctgtctg

SEQ ID NO: 14811 - DNA, 20 bp, Artificial Sequence
  Description of Artificial Sequence: Synthetic oligonucleotide
  Target: ANGPTL4; (-) strand; PAM type: YTN; PAM sequence: CTC
gaactcctgacctcgtgatc

SEQ ID NO: 14812 - DNA, 20 bp, Artificial Sequence
  Description of Artificial Sequence: Synthetic oligonucleotide
  Target: ANGPTL4; (-) strand; PAM type: YTN; PAM sequence: CTG
gtctcgaactcctgacctcg

SEQ ID NO: 14813 - DNA, 20 bp, Artificial Sequence
  Description of Artificial Sequence: Synthetic oligonucleotide
  Target: ANGPTL4; (-) strand; PAM type: YTN; PAM sequence: TTG
gtcaggctggtctcgaactc

SEQ ID NO: 14814 - DNA, 20 bp, Artificial Sequence
  Description of Artificial Sequence: Synthetic oligonucleotide
  Target: ANGPTL4; (-) strand; PAM type: YTN; PAM sequence: TTC
accatgttggtcaggctggt

SEQ ID NO: 14815 - DNA, 20 bp, Artificial Sequence
  Description of Artificial Sequence: Synthetic oligonucleotide
  Target: ANGPTL4; (-) strand; PAM type: YTN; PAM sequence: TTT
caccatgttggtcaggctgg

SEQ ID NO: 14816 - DNA, 20 bp, Artificial Sequence
  Description of Artificial Sequence: Synthetic oligonucleotide
  Target: ANGPTL4; (-) strand; PAM type: YTN; PAM sequence: TTA
gtagagacggggtttcacca

SEQ ID NO: 14817 - DNA, 20 bp, Artificial Sequence
  Description of Artificial Sequence: Synthetic oligonucleotide
  Target: ANGPTL4; (-) strand; PAM type: YTN; PAM sequence: TTT
agtagagacggggtttcacc

SEQ ID NO: 14818 - DNA, 20 bp, Artificial Sequence
  Description of Artificial Sequence: Synthetic oligonucleotide
  Target: ANGPTL4; (-) strand; PAM type: YTN; PAM sequence: TTT
tagtagagacggggtttcac

SEQ ID NO: 14819 - DNA, 20 bp, Artificial Sequence
  Description of Artificial Sequence: Synthetic oligonucleotide
  Target: ANGPTL4; (-) strand; PAM type: YTN; PAM sequence: TTT
ttagtagagacggggtttca

SEQ ID NO: 14820 - DNA, 20 bp, Artificial Sequence
  Description of Artificial Sequence: Synthetic oligonucleotide
  Target: ANGPTL4; (-) strand; PAM type: YTN; PAM sequence: TTG
tatttttagtagagacgggg

SEQ ID NO: 14821 - DNA, 20 bp, Artificial Sequence
  Description of Artificial Sequence: Synthetic oligonucleotide
  Target: ANGPTL4; (-) strand; PAM type: YTN; PAM sequence: TTT
gtatttttagtagagacggg

SEQ ID NO: 14822 - DNA, 20 bp, Artificial Sequence
  Description of Artificial Sequence: Synthetic oligonucleotide
  Target: ANGPTL4; (-) strand; PAM type: YTN; PAM sequence: TTT
tgtatttttagtagagacgg

SEQ ID NO: 14823 - DNA, 20 bp, Artificial Sequence
  Description of Artificial Sequence: Synthetic oligonucleotide
  Target: ANGPTL4; (-) strand; PAM type: YTN; PAM sequence: TTT
ttgtatttttagtagagacg

SEQ ID NO: 14824 - DNA, 20 bp, Artificial Sequence
  Description of Artificial Sequence: Synthetic oligonucleotide
  Target: ANGPTL4; (-) strand; PAM type: YTN; PAM sequence: CTA
atttttgtatttttagtaga

SEQ ID NO: 14825 - DNA, 20 bp, Artificial Sequence
  Description of Artificial Sequence: Synthetic oligonucleotide
  Target: ANGPTL4; (-) strand; PAM type: YTN; PAM sequence: TTA
caggtgcacaccaccatgcc

SEQ ID NO: 14826 - DNA, 20 bp, Artificial Sequence
  Description of Artificial Sequence: Synthetic oligonucleotide
  Target: ANGPTL4; (-) strand; PAM type: YTN; PAM sequence: CTG
ggattacaggtgcacaccac

SEQ ID NO: 14827 - DNA, 20 bp, Artificial Sequence
  Description of Artificial Sequence: Synthetic oligonucleotide
  Target: ANGPTL4; (-) strand; PAM type: YTN; PAM sequence: CTG
agtagctgggattacaggtg

SEQ ID NO: 14828 - DNA, 20 bp, Artificial Sequence
  Description of Artificial Sequence: Synthetic oligonucleotide
  Target: ANGPTL4; (-) strand; PAM type: YTN; PAM sequence: CTC
agccacctgagtagctggga

SEQ ID NO: 14829 - DNA, 20 bp, Artificial Sequence
  Description of Artificial Sequence: Synthetic oligonucleotide
  Target: ANGPTL4; (-) strand; PAM type: YTN; PAM sequence: CTG
cctcagccacctgagtagct

SEQ ID NO: 14830 - DNA, 20 bp, Artificial Sequence
  Description of Artificial Sequence: Synthetic oligonucleotide
  Target: ANGPTL4; (-) strand; PAM type: YTN; PAM sequence: CTC
ctgcctcagccacctgagta

SEQ ID NO: 14831 - DNA, 20 bp, Artificial Sequence
  Description of Artificial Sequence: Synthetic oligonucleotide
  Target: ANGPTL4; (-) strand; PAM type: YTN; PAM sequence: TTC
tcctgcctcagccacctgag

SEQ ID NO: 14832 - DNA, 20 bp, Artificial Sequence
  Description of Artificial Sequence: Synthetic oligonucleotide
  Target: ANGPTL4; (-) strand; PAM type: YTN; PAM sequence: TTC
aagagattctcctgcctcag

SEQ ID NO: 14833 - DNA, 20 bp, Artificial Sequence
  Description of Artificial Sequence: Synthetic oligonucleotide
  Target: ANGPTL4; (-) strand; PAM type: YTN; PAM sequence: CTC
ccaggttcaagagattctcc

SEQ ID NO: 14834 - DNA, 20 bp, Artificial Sequence
  Description of Artificial Sequence: Synthetic oligonucleotide
  Target: ANGPTL4; (-) strand; PAM type: YTN; PAM sequence: CTG
cctcccaggttcaagagatt

SEQ ID NO: 14835 - DNA, 20 bp, Artificial Sequence
  Description of Artificial Sequence: Synthetic oligonucleotide
  Target: ANGPTL4; (-) strand; PAM type: YTN; PAM sequence: CTC
tgcctcccaggttcaagaga

SEQ ID NO: 14836 - DNA, 20 bp, Artificial Sequence
  Description of Artificial Sequence: Synthetic oligonucleotide
  Target: ANGPTL4; (-) strand; PAM type: YTN; PAM sequence: CTG
caacctctgcctcccaggtt

SEQ ID NO: 14837 - DNA, 20 bp, Artificial Sequence
  Description of Artificial Sequence: Synthetic oligonucleotide
  Target: ANGPTL4; (-) strand; PAM type: YTN; PAM sequence: CTC
actgcaacctctgcctccca

SEQ ID NO: 14838 - DNA, 20 bp, Artificial Sequence
  Description of Artificial Sequence: Synthetic oligonucleotide
  Target: ANGPTL4; (-) strand; PAM type: YTN; PAM sequence: CTC
agctcactgcaacctctgcc

SEQ ID NO: 14839 - DNA, 20 bp, Artificial Sequence
  Description of Artificial Sequence: Synthetic oligonucleotide
  Target: ANGPTL4; (-) strand; PAM type: YTN; PAM sequence: CTG
gagtgcggtggcgtcatctc

SEQ ID NO: 14840 - DNA, 20 bp, Artificial Sequence
  Description of Artificial Sequence: Synthetic oligonucleotide
  Target: ANGPTL4; (-) strand; PAM type: YTN; PAM sequence: CTG
tcgcccaggctggagtgcgg

SEQ ID NO: 14841 - DNA, 20 bp, Artificial Sequence
  Description of Artificial Sequence: Synthetic oligonucleotide
  Target: ANGPTL4; (-) strand; PAM type: YTN; PAM sequence: CTC
tgtcgcccaggctggagtgc

SEQ ID NO: 14842 - DNA, 20 bp, Artificial Sequence
  Description of Artificial Sequence: Synthetic oligonucleotide
  Target: ANGPTL4; (-) strand; PAM type: YTN; PAM sequence: CTC
gctctgtcgcccaggctgga

SEQ ID NO: 14843 - DNA, 20 bp, Artificial Sequence
  Description of Artificial Sequence: Synthetic oligonucleotide
  Target: ANGPTL4; (-) strand; PAM type: YTN; PAM sequence: TTG
atggggggacggagtctcgc

SEQ ID NO: 14844 - DNA, 20 bp, Artificial Sequence
  Description of Artificial Sequence: Synthetic oligonucleotide
  Target: ANGPTL4; (-) strand; PAM type: YTN; PAM sequence: TTT
gatggggggacggagtctcg

SEQ ID NO: 14845 - DNA, 20 bp, Artificial Sequence
  Description of Artificial Sequence: Synthetic oligonucleotide
  Target: ANGPTL4; (-) strand; PAM type: YTN; PAM sequence: TTT
tgatggggggacggagtctc

SEQ ID NO: 14846 - DNA, 20 bp, Artificial Sequence
  Description of Artificial Sequence: Synthetic oligonucleotide
  Target: ANGPTL4; (-) strand; PAM type: YTN; PAM sequence: TTT
ttgatggggggacggagtct

SEQ ID NO: 14847 - DNA, 20 bp, Artificial Sequence
  Description of Artificial Sequence: Synthetic oligonucleotide
  Target: ANGPTL4; (-) strand; PAM type: YTN; PAM sequence: TTT
tttgatggggggacggagtc

SEQ ID NO: 14848 - DNA, 20 bp, Artificial Sequence
  Description of Artificial Sequence: Synthetic oligonucleotide
  Target: ANGPTL4; (-) strand; PAM type: YTN; PAM sequence: TTT
ttttgatggggggacggagt

SEQ ID NO: 14849 - DNA, 20 bp, Artificial Sequence
  Description of Artificial Sequence: Synthetic oligonucleotide
  Target: ANGPTL4; (-) strand; PAM type: YTN; PAM sequence: TTA
tttttttgatggggggacgg

SEQ ID NO: 14850 - DNA, 20 bp, Artificial Sequence
  Description of Artificial Sequence: Synthetic oligonucleotide
  Target: ANGPTL4; (-) strand; PAM type: YTN; PAM sequence: TTT
atttttttgatggggggacg

SEQ ID NO: 14851 - DNA, 20 bp, Artificial Sequence
  Description of Artificial Sequence: Synthetic oligonucleotide
  Target: ANGPTL4; (-) strand; PAM type: YTN; PAM sequence: TTT
tatttttttgatggggggac

SEQ ID NO: 14852 - DNA, 20 bp, Artificial Sequence
  Description of Artificial Sequence: Synthetic oligonucleotide
  Target: ANGPTL4; (-) strand; PAM type: YTN; PAM sequence: TTT
ttatttttttgatgggggga

SEQ ID NO: 14853 - DNA, 20 bp, Artificial Sequence
  Description of Artificial Sequence: Synthetic oligonucleotide
  Target: ANGPTL4; (-) strand; PAM type: YTN; PAM sequence: TTT
tttatttttttgatgggggg

SEQ ID NO: 14854 - DNA, 20 bp, Artificial Sequence
  Description of Artificial Sequence: Synthetic oligonucleotide
  Target: ANGPTL4; (-) strand; PAM type: YTN; PAM sequence: CTT
ttttatttttttgatggggg

SEQ ID NO: 14855 - DNA, 20 bp, Artificial Sequence
  Description of Artificial Sequence: Synthetic oligonucleotide
  Target: ANGPTL4; (-) strand; PAM type: YTN; PAM sequence: CTC
ttttttatttttttgatggg

SEQ ID NO: 14856 - DNA, 20 bp, Artificial Sequence
  Description of Artificial Sequence: Synthetic oligonucleotide
  Target: ANGPTL4; (-) strand; PAM type: YTN; PAM sequence: TTC
tcttttttatttttttgatg

SEQ ID NO: 14857 - DNA, 20 bp, Artificial Sequence
  Description of Artificial Sequence: Synthetic oligonucleotide
  Target: ANGPTL4; (-) strand; PAM type: YTN; PAM sequence: TTT
ctcttttttatttttttgat

SEQ ID NO: 14858 - DNA, 20 bp, Artificial Sequence
  Description of Artificial Sequence: Synthetic oligonucleotide
  Target: ANGPTL4; (-) strand; PAM type: YTN; PAM sequence: TTT
tctcttttttatttttttga

SEQ ID NO: 14859 - DNA, 20 bp, Artificial Sequence
  Description of Artificial Sequence: Synthetic oligonucleotide
  Target: ANGPTL4; (-) strand; PAM type: YTN; PAM sequence: TTA
ttttctcttttttatttttt

SEQ ID NO: 14860 - DNA, 20 bp, Artificial Sequence
  Description of Artificial Sequence: Synthetic oligonucleotide
  Target: ANGPTL4; (-) strand; PAM type: YTN; PAM sequence: TTT
attttctcttttttattttt

SEQ ID NO: 14861 - DNA, 20 bp, Artificial Sequence
  Description of Artificial Sequence: Synthetic oligonucleotide
  Target: ANGPTL4; (-) strand; PAM type: YTN; PAM sequence: TTT
tattttctcttttttatttt

SEQ ID NO: 14862 - DNA, 20 bp, Artificial Sequence
  Description of Artificial Sequence: Synthetic oligonucleotide
  Target: ANGPTL4; (-) strand; PAM type: YTN; PAM sequence: TTA
ttttattttctcttttttat

SEQ ID NO: 14863 - DNA, 20 bp, Artificial Sequence
  Description of Artificial Sequence: Synthetic oligonucleotide
  Target: ANGPTL4; (-) strand; PAM type: YTN; PAM sequence: TTT
attttattttctctttttta

SEQ ID NO: 14864 - DNA, 20 bp, Artificial Sequence
  Description of Artificial Sequence: Synthetic oligonucleotide
  Target: ANGPTL4; (-) strand; PAM type: YTN; PAM sequence: TTT
tattttattttctctttttt

SEQ ID NO: 14865 - DNA, 20 bp, Artificial Sequence
  Description of Artificial Sequence: Synthetic oligonucleotide
  Target: ANGPTL4; (-) strand; PAM type: YTN; PAM sequence: TTA
ttttattttattttctcttt

SEQ ID NO: 14866 - DNA, 20 bp, Artificial Sequence
  Description of Artificial Sequence: Synthetic oligonucleotide
  Target: ANGPTL4; (-) strand; PAM type: YTN; PAM sequence: TTT
attttattttattttctctt

SEQ ID NO: 14867 - DNA, 20 bp, Artificial Sequence
  Description of Artificial Sequence: Synthetic oligonucleotide
  Target: ANGPTL4; (-) strand; PAM type: YTN; PAM sequence: TTT
tattttattttattttctct

SEQ ID NO: 14868 - DNA, 20 bp, Artificial Sequence
  Description of Artificial Sequence: Synthetic oligonucleotide
  Target: ANGPTL4; (-) strand; PAM type: YTN; PAM sequence: TTA
ttttattttattttattttc

SEQ ID NO: 14869 - DNA, 20 bp, Artificial Sequence
  Description of Artificial Sequence: Synthetic oligonucleotide
  Target: ANGPTL4; (-) strand; PAM type: YTN; PAM sequence: TTT
attttattttattttatttt

SEQ ID NO: 14870 - DNA, 20 bp, Artificial Sequence
  Description of Artificial Sequence: Synthetic oligonucleotide
  Target: ANGPTL4; (-) strand; PAM type: YTN; PAM sequence: TTT
tattttattttattttattt

SEQ ID NO: 14871 - DNA, 20 bp, Artificial Sequence
  Description of Artificial Sequence: Synthetic oligonucleotide
  Target: ANGPTL4; (-) strand; PAM type: YTN; PAM sequence: CTG
aattttattttattttattt

SEQ ID NO: 14872 - DNA, 20 bp, Artificial Sequence
  Description of Artificial Sequence: Synthetic oligonucleotide
  Target: ANGPTL4; (-) strand; PAM type: YTN; PAM sequence: CTA
caggcatgtgccaccatgcc

SEQ ID NO: 14873 - DNA, 20 bp, Artificial Sequence
  Description of Artificial Sequence: Synthetic oligonucleotide
  Target: ANGPTL4; (-) strand; PAM type: YTN; PAM sequence: CTG
ggactacaggcatgtgccac

SEQ ID NO: 14874 - DNA, 20 bp, Artificial Sequence
  Description of Artificial Sequence: Synthetic oligonucleotide
  Target: ANGPTL4; (-) strand; PAM type: YTN; PAM sequence: CTC
ccgagtagctgggactacag

SEQ ID NO: 14875 - DNA, 20 bp, Artificial Sequence
  Description of Artificial Sequence: Synthetic oligonucleotide
  Target: ANGPTL4; (-) strand; PAM type: YTN; PAM sequence: TTG
gcctcccgagtagctgggac

SEQ ID NO: 14876 - DNA, 20 bp, Artificial Sequence
  Description of Artificial Sequence: Synthetic oligonucleotide
  Target: ANGPTL4; (-) strand; PAM type: YTN; PAM sequence: CTT
ggcctcccgagtagctggga

SEQ ID NO: 14877 - DNA, 20 bp, Artificial Sequence
  Description of Artificial Sequence: Synthetic oligonucleotide
  Target: ANGPTL4; (-) strand; PAM type: YTN; PAM sequence: CTG
ccttggcctcccgagtagct

SEQ ID NO: 14878 - DNA, 20 bp, Artificial Sequence
  Description of Artificial Sequence: Synthetic oligonucleotide
  Target: ANGPTL4; (-) strand; PAM type: YTN; PAM sequence: CTC
ctgccttggcctcccgagta

SEQ ID NO: 14879 - DNA, 20 bp, Artificial Sequence
  Description of Artificial Sequence: Synthetic oligonucleotide
  Target: ANGPTL4; (-) strand; PAM type: YTN; PAM sequence: CTG
aagtgaccctcctgccttgg

SEQ ID NO: 14880 - DNA, 20 bp, Artificial Sequence
  Description of Artificial Sequence: Synthetic oligonucleotide
  Target: ANGPTL4; (-) strand; PAM type: YTN; PAM sequence: CTG
ggctgaagtgaccctcctgc

SEQ ID NO: 14881 - DNA, 20 bp, Artificial Sequence
  Description of Artificial Sequence: Synthetic oligonucleotide
  Target: ANGPTL4; (-) strand; PAM type: YTN; PAM sequence: CTC
ctgggctgaagtgaccctcc

SEQ ID NO: 14882 - DNA, 20 bp, Artificial Sequence
  Description of Artificial Sequence: Synthetic oligonucleotide
  Target: ANGPTL4; (-) strand; PAM type: YTN; PAM sequence: TTA
actcctgggctgaagtgacc

SEQ ID NO: 14883 - DNA, 20 bp, Artificial Sequence
  Description of Artificial Sequence: Synthetic oligonucleotide
  Target: ANGPTL4; (-) strand; PAM type: YTN; PAM sequence: TTT
aactcctgggctgaagtgac

SEQ ID NO: 14884 - DNA, 20 bp, Artificial Sequence
  Description of Artificial Sequence: Synthetic oligonucleotide
  Target: ANGPTL4; (-) strand; PAM type: YTN; PAM sequence: CTT
taactcctgggctgaagtga

SEQ ID NO: 14885 - DNA, 20 bp, Artificial Sequence
  Description of Artificial Sequence: Synthetic oligonucleotide
  Target: ANGPTL4; (-) strand; PAM type: YTN; PAM sequence: CTC
acggcagcctttaactcctg

SEQ ID NO: 14886 - DNA, 20 bp, Artificial Sequence
  Description of Artificial Sequence: Synthetic oligonucleotide
  Target: ANGPTL4; (-) strand; PAM type: YTN; PAM sequence: TTC
acaggtgtgatcacggctca

SEQ ID NO: 14887 - DNA, 20 bp, Artificial Sequence
  Description of Artificial Sequence: Synthetic oligonucleotide
  Target: ANGPTL4; (-) strand; PAM type: YTN; PAM sequence: CTA
ttcacaggtgtgatcacggc

SEQ ID NO: 14888 - DNA, 20 bp, Artificial Sequence
  Description of Artificial Sequence: Synthetic oligonucleotide
  Target: ANGPTL4; (-) strand; PAM type: YTN; PAM sequence: TTG
gagtgcggtggctattcaca

SEQ ID NO: 14889 - DNA, 20 bp, Artificial Sequence
  Description of Artificial Sequence: Synthetic oligonucleotide
  Target: ANGPTL4; (-) strand; PAM type: YTN; PAM sequence: TTG
cccaggttggagtgcggtgg

SEQ ID NO: 14890 - DNA, 20 bp, Artificial Sequence
  Description of Artificial Sequence: Synthetic oligonucleotide
  Target: ANGPTL4; (-) strand; PAM type: YTN; PAM sequence: TTG
tgttgcccaggttggagtgc

SEQ ID NO: 14891 - DNA, 20 bp, Artificial Sequence
  Description of Artificial Sequence: Synthetic oligonucleotide
  Target: ANGPTL4; (-) strand; PAM type: YTN; PAM sequence: TTG
ttgtgttgcccaggttggag

SEQ ID NO: 14892 - DNA, 20 bp, Artificial Sequence
  Description of Artificial Sequence: Synthetic oligonucleotide
  Target: ANGPTL4; (-) strand; PAM type: YTN; PAM sequence: TTT
gttgtgttgcccaggttgga

SEQ ID NO: 14893 - DNA, 20 bp, Artificial Sequence
  Description of Artificial Sequence: Synthetic oligonucleotide
  Target: ANGPTL4; (-) strand; PAM type: YTN; PAM sequence: TTT
tgttgtgttgcccaggttgg

SEQ ID NO: 14894 - DNA, 20 bp, Artificial Sequence
  Description of Artificial Sequence: Synthetic oligonucleotide
  Target: ANGPTL4; (-) strand; PAM type: YTN; PAM sequence: TTA
gaaacgaggttttgttgtgt

SEQ ID NO: 14895 - DNA, 20 bp, Artificial Sequence
  Description of Artificial Sequence: Synthetic oligonucleotide
  Target: ANGPTL4; (-) strand; PAM type: YTN; PAM sequence: TTT
agaaacgaggttttgttgtg

SEQ ID NO: 14896 - DNA, 20 bp, Artificial Sequence
  Description of Artificial Sequence: Synthetic oligonucleotide
  Target: ANGPTL4; (-) strand; PAM type: YTN; PAM sequence: TTT
tagaaacgaggttttgttgt

SEQ ID NO: 14897 - DNA, 20 bp, Artificial Sequence
  Description of Artificial Sequence: Synthetic oligonucleotide
  Target: ANGPTL4; (-) strand; PAM type: YTN; PAM sequence: TTT
ttagaaacgaggttttgttg

SEQ ID NO: 14898 - DNA, 20 bp, Artificial Sequence
  Description of Artificial Sequence: Synthetic oligonucleotide
  Target: ANGPTL4; (-) strand; PAM type: YTN; PAM sequence: TTT
tttagaaacgaggttttgtt

SEQ ID NO: 14899 - DNA, 20 bp, Artificial Sequence
  Description of Artificial Sequence: Synthetic oligonucleotide
  Target: ANGPTL4; (-) strand; PAM type: YTN; PAM sequence: TTT
ttttagaaacgaggttttgt

SEQ ID NO: 14900 - DNA, 20 bp, Artificial Sequence
  Description of Artificial Sequence: Synthetic oligonucleotide
  Target: ANGPTL4; (-) strand; PAM type: YTN; PAM sequence: TTT
tttttagaaacgaggttttg

SEQ ID NO: 14901 - DNA, 20 bp, Artificial Sequence
  Description of Artificial Sequence: Synthetic oligonucleotide
  Target: ANGPTL4; (-) strand; PAM type: YTN; PAM sequence: TTT
ttttttagaaacgaggtttt

SEQ ID NO: 14902 - DNA, 20 bp, Artificial Sequence
  Description of Artificial Sequence: Synthetic oligonucleotide
  Target: ANGPTL4; (-) strand; PAM type: YTN; PAM sequence: TTG
tttttttttagaaacgaggt

SEQ ID NO: 14903 - DNA, 20 bp, Artificial Sequence
  Description of Artificial Sequence: Synthetic oligonucleotide
  Target: ANGPTL4; (-) strand; PAM type: YTN; PAM sequence: TTT
gtttttttttagaaacgagg

SEQ ID NO: 14904 - DNA, 20 bp, Artificial Sequence
  Description of Artificial Sequence: Synthetic oligonucleotide
  Target: ANGPTL4; (-) strand; PAM type: YTN; PAM sequence: CTT
tgtttttttttagaaacgag

SEQ ID NO: 14905 - DNA, 20 bp, Artificial Sequence
  Description of Artificial Sequence: Synthetic oligonucleotide
  Target: ANGPTL4; (-) strand; PAM type: YTN; PAM sequence: CTC
agcctttgtttttttttaga

SEQ ID NO: 14906 - DNA, 20 bp, Artificial Sequence
  Description of Artificial Sequence: Synthetic oligonucleotide
  Target: ANGPTL4; (-) strand; PAM type: YTN; PAM sequence: TTC
aggtgtaagccaccgtgctc

SEQ ID NO: 14907 - DNA, 20 bp, Artificial Sequence
  Description of Artificial Sequence: Synthetic oligonucleotide
  Target: ANGPTL4; (-) strand; PAM type: YTN; PAM sequence: TTT
caggtgtaagccaccgtgct

SEQ ID NO: 14908 - DNA, 20 bp, Artificial Sequence
  Description of Artificial Sequence: Synthetic oligonucleotide
  Target: ANGPTL4; (-) strand; PAM type: YTN; PAM sequence: CTG
gcatttcaggtgtaagccac

SEQ ID NO: 14909 - DNA, 20 bp, Artificial Sequence
  Description of Artificial Sequence: Synthetic oligonucleotide
  Target: ANGPTL4; (-) strand; PAM type: YTN; PAM sequence: CTC
ccaaagtgctggcatttcag

SEQ ID NO: 14910 - DNA, 20 bp, Artificial Sequence
  Description of Artificial Sequence: Synthetic oligonucleotide
  Target: ANGPTL4; (-) strand; PAM type: YTN; PAM sequence: CTC
agcctcccaaagtgctggca

SEQ ID NO: 14911 - DNA, 20 bp, Artificial Sequence
  Description of Artificial Sequence: Synthetic oligonucleotide
  Target: ANGPTL4; (-) strand; PAM type: YTN; PAM sequence: TTG
cccgcctcagcctcccaaag

SEQ ID NO: 14912 - DNA, 20 bp, Artificial Sequence
  Description of Artificial Sequence: Synthetic oligonucleotide
  Target: ANGPTL4; (-) strand; PAM type: YTN; PAM sequence: TTT
gcccgcctcagcctcccaaa

SEQ ID NO: 14913 - DNA, 20 bp, Artificial Sequence
  Description of Artificial Sequence: Synthetic oligonucleotide
  Target: ANGPTL4; (-) strand; PAM type: YTN; PAM sequence: CTC
aagtgatttgcccgcctcag

SEQ ID NO: 14914 - DNA, 20 bp, Artificial Sequence
  Description of Artificial Sequence: Synthetic oligonucleotide
  Target: ANGPTL4; (-) strand; PAM type: YTN; PAM sequence: CTG
acctcaagtgatttgcccgc

SEQ ID NO: 14915 - DNA, 20 bp, Artificial Sequence
  Description of Artificial Sequence: Synthetic oligonucleotide
  Target: ANGPTL4; (-) strand; PAM type: YTN; PAM sequence: TTC
tgacctcaagtgatttgccc

SEQ ID NO: 14916 - DNA, 20 bp, Artificial Sequence
  Description of Artificial Sequence: Synthetic oligonucleotide
  Target: ANGPTL4; (-) strand; PAM type: YTN; PAM sequence: CTT
ctgacctcaagtgatttgcc

SEQ ID NO: 14917 - DNA, 20 bp, Artificial Sequence
  Description of Artificial Sequence: Synthetic oligonucleotide
  Target: ANGPTL4; (-) strand; PAM type: YTN; PAM sequence: TTG
aacttctgacctcaagtgat

SEQ ID NO: 14918 - DNA, 20 bp, Artificial Sequence
  Description of Artificial Sequence: Synthetic oligonucleotide
  Target: ANGPTL4; (-) strand; PAM type: YTN; PAM sequence: CTT
gaacttctgacctcaagtga

SEQ ID NO: 14919 - DNA, 20 bp, Artificial Sequence
  Description of Artificial Sequence: Synthetic oligonucleotide
  Target: ANGPTL4; (-) strand; PAM type: YTN; PAM sequence: CTG
gtcttgaacttctgacctca

SEQ ID NO: 14920 - DNA, 20 bp, Artificial Sequence
  Description of Artificial Sequence: Synthetic oligonucleotide
  Target: ANGPTL4; (-) strand; PAM type: YTN; PAM sequence: TTG
gccaggctggtcttgaactt

SEQ ID NO: 14921 - DNA, 20 bp, Artificial Sequence
  Description of Artificial Sequence: Synthetic oligonucleotide
  Target: ANGPTL4; (-) strand; PAM type: YTN; PAM sequence: TTC
accatgttggccaggctggt

SEQ ID NO: 14922 - DNA, 20 bp, Artificial Sequence
  Description of Artificial Sequence: Synthetic oligonucleotide
  Target: ANGPTL4; (-) strand; PAM type: YTN; PAM sequence: TTT
caccatgttggccaggctgg

SEQ ID NO: 14923 - DNA, 20 bp, Artificial Sequence
  Description of Artificial Sequence: Synthetic oligonucleotide
  Target: ANGPTL4; (-) strand; PAM type: YTN; PAM sequence: TTG
gtagagatagggtttcacca

SEQ ID NO: 14924 - DNA, 20 bp, Artificial Sequence
  Description of Artificial Sequence: Synthetic oligonucleotide
  Target: ANGPTL4; (-) strand; PAM type: YTN; PAM sequence: TTA
tgttggtagagatagggttt

SEQ ID NO: 14925 - DNA, 20 bp, Artificial Sequence
  Description of Artificial Sequence: Synthetic oligonucleotide
  Target: ANGPTL4; (-) strand; PAM type: YTN; PAM sequence: TTT
atgttggtagagatagggtt

SEQ ID NO: 14926 - DNA, 20 bp, Artificial Sequence
  Description of Artificial Sequence: Synthetic oligonucleotide
  Target: ANGPTL4; (-) strand; PAM type: YTN; PAM sequence: CTA
atgtttatgttggtagagat

SEQ ID NO: 14927 - DNA, 20 bp, Artificial Sequence
  Description of Artificial Sequence: Synthetic oligonucleotide
  Target: ANGPTL4; (-) strand; PAM type: YTN; PAM sequence: CTG
gaatcacaggcacgcccggc

SEQ ID NO: 14928 - DNA, 20 bp, Artificial Sequence
  Description of Artificial Sequence: Synthetic oligonucleotide
  Target: ANGPTL4; (-) strand; PAM type: YTN; PAM sequence: TTC
agccccacaagcagctggaa

SEQ ID NO: 14929 - DNA, 20 bp, Artificial Sequence
  Description of Artificial Sequence: Synthetic oligonucleotide
  Target: ANGPTL4; (-) strand; PAM type: YTN; PAM sequence: CTT
cagccccacaagcagctgga

SEQ ID NO: 14930 - DNA, 20 bp, Artificial Sequence
  Description of Artificial Sequence: Synthetic oligonucleotide
  Target: ANGPTL4; (-) strand; PAM type: YTN; PAM sequence: TTG
tgcttcagccccacaagcag

SEQ ID NO: 14931 - DNA, 20 bp, Artificial Sequence
  Description of Artificial Sequence: Synthetic oligonucleotide
  Target: ANGPTL4; (-) strand; PAM type: YTN; PAM sequence: CTT
gtgcttcagccccacaagca

SEQ ID NO: 14932 - DNA, 20 bp, Artificial Sequence
  Description of Artificial Sequence: Synthetic oligonucleotide
  Target: ANGPTL4; (-) strand; PAM type: YTN; PAM sequence: TTC
ttgtgcttcagccccacaag

SEQ ID NO: 14933 - DNA, 20 bp, Artificial Sequence
  Description of Artificial Sequence: Synthetic oligonucleotide
  Target: ANGPTL4; (-) strand; PAM type: YTN; PAM sequence: CTC
aagcgattcttgtgcttcag

SEQ ID NO: 14934 - DNA, 20 bp, Artificial Sequence
  Description of Artificial Sequence: Synthetic oligonucleotide
  Target: ANGPTL4; (-) strand; PAM type: YTN; PAM sequence: TTC
ggggctcaagcgattcttgt

SEQ ID NO: 14935 - DNA, 20 bp, Artificial Sequence
  Description of Artificial Sequence: Synthetic oligonucleotide
  Target: ANGPTL4; (-) strand; PAM type: YTN; PAM sequence: CTT
cggggctcaagcgattcttg

SEQ ID NO: 14936 - DNA, 20 bp, Artificial Sequence
  Description of Artificial Sequence: Synthetic oligonucleotide
  Target: ANGPTL4; (-) strand; PAM type: YTN; PAM sequence: CTG
ccttcggggctcaagcgatt

SEQ ID NO: 14937 - DNA, 20 bp, Artificial Sequence
  Description of Artificial Sequence: Synthetic oligonucleotide
  Target: ANGPTL4; (-) strand; PAM type: YTN; PAM sequence: CTC
tgccttcggggctcaagcga

SEQ ID NO: 14938 - DNA, 20 bp, Artificial Sequence
  Description of Artificial Sequence: Synthetic oligonucleotide
  Target: ANGPTL4; (-) strand; PAM type: YTN; PAM sequence: CTG
caacctctgccttcggggct

SEQ ID NO: 14939 - DNA, 20 bp, Artificial Sequence
  Description of Artificial Sequence: Synthetic oligonucleotide
  Target: ANGPTL4; (-) strand; PAM type: YTN; PAM sequence: CTC
actgcaacctctgccttcgg

SEQ ID NO: 14940 - DNA, 20 bp, Artificial Sequence
  Description of Artificial Sequence: Synthetic oligonucleotide
  Target: ANGPTL4; (-) strand; PAM type: YTN; PAM sequence: CTC
agctcactgcaacctctgcc

SEQ ID NO: 14941 - DNA, 20 bp, Artificial Sequence
  Description of Artificial Sequence: Synthetic oligonucleotide
  Target: ANGPTL4; (-) strand; PAM type: YTN; PAM sequence: CTG
gatcgcagtgccgcaatctc

SEQ ID NO: 14942 - DNA, 20 bp, Artificial Sequence
  Description of Artificial Sequence: Synthetic oligonucleotide
  Target: ANGPTL4; (-) strand; PAM type: YTN; PAM sequence: TTG
cccaggctggatcgcagtgc

SEQ ID NO: 14943 - DNA, 20 bp, Artificial Sequence
  Description of Artificial Sequence: Synthetic oligonucleotide
  Target: ANGPTL4; (-) strand; PAM type: YTN; PAM sequence: CTG
ttgcccaggctggatcgcag

SEQ ID NO: 14944 - DNA, 20 bp, Artificial Sequence
  Description of Artificial Sequence: Synthetic oligonucleotide
  Target: ANGPTL4; (-) strand; PAM type: YTN; PAM sequence: CTC
tgttgcccaggctggatcgc

SEQ ID NO: 14945 - DNA, 20 bp, Artificial Sequence
  Description of Artificial Sequence: Synthetic oligonucleotide
  Target: ANGPTL4; (-) strand; PAM type: YTN; PAM sequence: CTC
actctgttgcccaggctgga

SEQ ID NO: 14946 - DNA, 20 bp, Artificial Sequence
  Description of Artificial Sequence: Synthetic oligonucleotide
  Target: ANGPTL4; (-) strand; PAM type: YTN; PAM sequence: TTA
gagatggagtctcactctgt

SEQ ID NO: 14947 - DNA, 20 bp, Artificial Sequence
  Description of Artificial Sequence: Synthetic oligonucleotide
  Target: ANGPTL4; (-) strand; PAM type: YTN; PAM sequence: TTT
agagatggagtctcactctg

SEQ ID NO: 14948 - DNA, 20 bp, Artificial Sequence
  Description of Artificial Sequence: Synthetic oligonucleotide
  Target: ANGPTL4; (-) strand; PAM type: YTN; PAM sequence: TTT
tagagatggagtctcactct

SEQ ID NO: 14949 - DNA, 20 bp, Artificial Sequence
  Description of Artificial Sequence: Synthetic oligonucleotide
  Target: ANGPTL4; (-) strand; PAM type: YTN; PAM sequence: TTT
ttagagatggagtctcactc

SEQ ID NO: 14950 - DNA, 20 bp, Artificial Sequence
  Description of Artificial Sequence: Synthetic oligonucleotide
  Target: ANGPTL4; (-) strand; PAM type: YTN; PAM sequence: TTT
tttagagatggagtctcact

SEQ ID NO: 14951 - DNA, 20 bp, Artificial Sequence
  Description of Artificial Sequence: Synthetic oligonucleotide
  Target: ANGPTL4; (-) strand; PAM type: YTN; PAM sequence: TTT
ttttagagatggagtctcac

SEQ ID NO: 14952 - DNA, 20 bp, Artificial Sequence
  Description of Artificial Sequence: Synthetic oligonucleotide
  Target: ANGPTL4; (-) strand; PAM type: YTN; PAM sequence: TTT
tttttagagatggagtctca

SEQ ID NO: 14953 - DNA, 20 bp, Artificial Sequence
  Description of Artificial Sequence: Synthetic oligonucleotide
  Target: ANGPTL4; (-) strand; PAM type: YTN; PAM sequence: TTT
ttttttagagatggagtctc

SEQ ID NO: 14954 - DNA, 20 bp, Artificial Sequence
  Description of Artificial Sequence: Synthetic oligonucleotide
  Target: ANGPTL4; (-) strand; PAM type: YTN; PAM sequence: TTT
tttttttagagatggagtct

SEQ ID NO: 14955 - DNA, 20 bp, Artificial Sequence
  Description of Artificial Sequence: Synthetic oligonucleotide
  Target: ANGPTL4; (-) strand; PAM type: YTN; PAM sequence: TTT
ttttttttagagatggagtc

SEQ ID NO: 14956 - DNA, 20 bp, Artificial Sequence
  Description of Artificial Sequence: Synthetic oligonucleotide
  Target: ANGPTL4; (-) strand; PAM type: YTN; PAM sequence: TTT
tttttttttagagatggagt

SEQ ID NO: 14957 - DNA, 20 bp, Artificial Sequence
  Description of Artificial Sequence: Synthetic oligonucleotide
  Target: ANGPTL4; (-) strand; PAM type: YTN; PAM sequence: TTT
ttttttttttagagatggag

SEQ ID NO: 14958 - DNA, 20 bp, Artificial Sequence
  Description of Artificial Sequence: Synthetic oligonucleotide
  Target: ANGPTL4; (-) strand; PAM type: YTN; PAM sequence: TTT
tttttttttttagagatgga

SEQ ID NO: 14959 - DNA, 20 bp, Artificial Sequence
  Description of Artificial Sequence: Synthetic oligonucleotide
  Target: ANGPTL4; (-) strand; PAM type: YTN; PAM sequence: TTT
ttttttttttttagagatgg

SEQ ID NO: 14960 - DNA, 20 bp, Artificial Sequence
  Description of Artificial Sequence: Synthetic oligonucleotide
  Target: ANGPTL4; (-) strand; PAM type: YTN; PAM sequence: TTT
tttttttttttttagagatg

SEQ ID NO: 14961 - DNA, 20 bp, Artificial Sequence
  Description of Artificial Sequence: Synthetic oligonucleotide
  Target: ANGPTL4; (-) strand; PAM type: YTN; PAM sequence: TTT
ttttttttttttttagagat

SEQ ID NO: 14962 - DNA, 20 bp, Artificial Sequence
  Description of Artificial Sequence: Synthetic oligonucleotide
  Target: ANGPTL4; (-) strand; PAM type: YTN; PAM sequence: TTT
tttttttttttttttagaga

SEQ ID NO: 14963 - DNA, 20 bp, Artificial Sequence
  Description of Artificial Sequence: Synthetic oligonucleotide
  Target: ANGPTL4; (-) strand; PAM type: YTN; PAM sequence: TTT
ttttttttttttttttagag

SEQ ID NO: 14964 - DNA, 20 bp, Artificial Sequence
  Description of Artificial Sequence: Synthetic oligonucleotide
  Target: ANGPTL4; (-) strand; PAM type: YTN; PAM sequence: TTT
tttttttttttttttttaga

SEQ ID NO: 14965 - DNA, 20 bp, Artificial Sequence
  Description of Artificial Sequence: Synthetic oligonucleotide
  Target: ANGPTL4; (-) strand; PAM type: YTN; PAM sequence: TTT
ttttttttttttttttttag

SEQ ID NO: 14966 - DNA, 20 bp, Artificial Sequence
  Description of Artificial Sequence: Synthetic oligonucleotide
  Target: ANGPTL4; (-) strand; PAM type: YTN; PAM sequence: CTT
ttttttttttttttttttta

SEQ ID NO: 14967 - DNA, 20 bp, Artificial Sequence
  Description of Artificial Sequence: Synthetic oligonucleotide
  Target: ANGPTL4; (-) strand; PAM type: YTN; PAM sequence: TTC
tttttttttttttttttttt

SEQ ID NO: 14968 - DNA, 20 bp, Artificial Sequence
  Description of Artificial Sequence: Synthetic oligonucleotide
  Target: ANGPTL4; (-) strand; PAM type: YTN; PAM sequence: TTT
cttttttttttttttttttt

SEQ ID NO: 14969 - DNA, 20 bp, Artificial Sequence
  Description of Artificial Sequence: Synthetic oligonucleotide
  Target: ANGPTL4; (-) strand; PAM type: YTN; PAM sequence: CTT
tctttttttttttttttttt

SEQ ID NO: 14970 - DNA, 20 bp, Artificial Sequence
  Description of Artificial Sequence: Synthetic oligonucleotide
  Target: ANGPTL4; (-) strand; PAM type: YTN; PAM sequence: CTC
agtggaaaaaaaagctttct

SEQ ID NO: 14971 - DNA, 20 bp, Artificial Sequence
  Description of Artificial Sequence: Synthetic oligonucleotide
  Target: ANGPTL4; (-) strand; PAM type: YTN; PAM sequence: TTC
tcagtggaaaaaaaagcttt

SEQ ID NO: 14972 - DNA, 20 bp, Artificial Sequence
  Description of Artificial Sequence: Synthetic oligonucleotide
  Target: ANGPTL4; (-) strand; PAM type: YTN; PAM sequence: CTT
ctcagtggaaaaaaaagctt

SEQ ID NO: 14973 - DNA, 20 bp, Artificial Sequence
  Description of Artificial Sequence: Synthetic oligonucleotide
  Target: ANGPTL4; (-) strand; PAM type: YTN; PAM sequence: TTG
taatggaaaggacttctcag

SEQ ID NO: 14974 - DNA, 20 bp, Artificial Sequence
  Description of Artificial Sequence: Synthetic oligonucleotide
  Target: ANGPTL4; (-) strand; PAM type: YTN; PAM sequence: CTT
gtaatggaaaggacttctca

SEQ ID NO: 14975 - DNA, 20 bp, Artificial Sequence
  Description of Artificial Sequence: Synthetic oligonucleotide
  Target: ANGPTL4; (-) strand; PAM type: YTN; PAM sequence: CTC
ttgtaatggaaaggacttct

SEQ ID NO: 14976 - DNA, 20 bp, Artificial Sequence
  Description of Artificial Sequence: Synthetic oligonucleotide
  Target: ANGPTL4; (-) strand; PAM type: YTN; PAM sequence: TTG
taacctcttgtaatggaaag

SEQ ID NO: 14977 - DNA, 20 bp, Artificial Sequence
  Description of Artificial Sequence: Synthetic oligonucleotide
  Target: ANGPTL4; (-) strand; PAM type: YTN; PAM sequence: CTG
ggtaaaaccccgtgttgtaa

SEQ ID NO: 14978 - DNA, 20 bp, Artificial Sequence
  Description of Artificial Sequence: Synthetic oligonucleotide
  Target: ANGPTL4; (-) strand; PAM type: YTN; PAM sequence: CTG
aactgggtaaaaccccgtgt

SEQ ID NO: 14979 - DNA, 20 bp, Artificial Sequence
  Description of Artificial Sequence: Synthetic oligonucleotide
  Target: ANGPTL4; (-) strand; PAM type: YTN; PAM sequence: CTG
ggccagctgaactgggtaaa

SEQ ID NO: 14980 - DNA, 20 bp, Artificial Sequence
  Description of Artificial Sequence: Synthetic oligonucleotide
  Target: ANGPTL4; (-) strand; PAM type: YTN; PAM sequence: CTC
tgggccagctgaactgggta

SEQ ID NO: 14981 - DNA, 20 bp, Artificial Sequence
  Description of Artificial Sequence: Synthetic oligonucleotide
  Target: ANGPTL4; (-) strand; PAM type: YTN; PAM sequence: CTC
tctgggccagctgaactggg

SEQ ID NO: 14982 - DNA, 20 bp, Artificial Sequence
  Description of Artificial Sequence: Synthetic oligonucleotide
  Target: ANGPTL4; (-) strand; PAM type: YTN; PAM sequence: CTG
caaagcctctctgggccagc

SEQ ID NO: 14983 - DNA, 20 bp, Artificial Sequence
  Description of Artificial Sequence: Synthetic oligonucleotide
  Target: ANGPTL4; (-) strand; PAM type: YTN; PAM sequence: CTG
agtgtgggagggagtaggca

SEQ ID NO: 14984 - DNA, 20 bp, Artificial Sequence
  Description of Artificial Sequence: Synthetic oligonucleotide
  Target: ANGPTL4; (-) strand; PAM type: YTN; PAM sequence: TTG
tcccaagaacccagcaggga

SEQ ID NO: 14985 - DNA, 20 bp, Artificial Sequence
  Description of Artificial Sequence: Synthetic oligonucleotide
  Target: ANGPTL4; (-) strand; PAM type: YTN; PAM sequence: TTT
gtcccaagaacccagcaggg

SEQ ID NO: 14986 - DNA, 20 bp, Artificial Sequence
  Description of Artificial Sequence: Synthetic oligonucleotide
  Target: ANGPTL4; (-) strand; PAM type: YTN; PAM sequence: CTT
tgtcccaagaacccagcagg

SEQ ID NO: 14987 - DNA, 20 bp, Artificial Sequence
  Description of Artificial Sequence: Synthetic oligonucleotide
  Target: ANGPTL4; (-) strand; PAM type: YTN; PAM sequence: TTG
ggaagatctttgtcccaaga

SEQ ID NO: 14988 - DNA, 20 bp, Artificial Sequence
  Description of Artificial Sequence: Synthetic oligonucleotide
  Target: ANGPTL4; (-) strand; PAM type: YTN; PAM sequence: CTT
gggaagatctttgtcccaag

SEQ ID NO: 14989 - DNA, 20 bp, Artificial Sequence
  Description of Artificial Sequence: Synthetic oligonucleotide
  Target: ANGPTL4; (-) strand; PAM type: YTN; PAM sequence: CTG
gccttgggaagatctttgtc

SEQ ID NO: 14990 - DNA, 20 bp, Artificial Sequence
  Description of Artificial Sequence: Synthetic oligonucleotide
  Target: ANGPTL4; (-) strand; PAM type: YTN; PAM sequence: TTA
tgggctggccttgggaagat

SEQ ID NO: 14991 - DNA, 20 bp, Artificial Sequence
  Description of Artificial Sequence: Synthetic oligonucleotide
  Target: ANGPTL4; (-) strand; PAM type: YTN; PAM sequence: CTC
gaggagggtgggtcagaggg

SEQ ID NO: 14992 - DNA, 20 bp, Artificial Sequence
  Description of Artificial Sequence: Synthetic oligonucleotide
  Target: ANGPTL4; (-) strand; PAM type: YTN; PAM sequence: CTG
gaggactcgaggagggtggg

SEQ ID NO: 14993 - DNA, 20 bp, Artificial Sequence
  Description of Artificial Sequence: Synthetic oligonucleotide
  Target: ANGPTL4; (-) strand; PAM type: YTN; PAM sequence: CTC
atccctggaggactcgagga

SEQ ID NO: 14994 - DNA, 20 bp, Artificial Sequence
  Description of Artificial Sequence: Synthetic oligonucleotide
  Target: ANGPTL4; (-) strand; PAM type: YTN; PAM sequence: CTC
actcatccctggaggactcg

SEQ ID NO: 14995 - DNA, 20 bp, Artificial Sequence
  Description of Artificial Sequence: Synthetic oligonucleotide
  Target: ANGPTL4; (-) strand; PAM type: YTN; PAM sequence: CTC
cctcactcatccctggagga

SEQ ID NO: 14996 - DNA, 20 bp, Artificial Sequence
  Description of Artificial Sequence: Synthetic oligonucleotide
  Target: ANGPTL4; (-) strand; PAM type: YTN; PAM sequence: CTC
caaacccaggaagacagcag

SEQ ID NO: 14997 - DNA, 20 bp, Artificial Sequence
  Description of Artificial Sequence: Synthetic oligonucleotide
  Target: ANGPTL4; (-) strand; PAM type: YTN; PAM sequence: CTG
ccaagcaccaaaccccctcc

SEQ ID NO: 14998 - DNA, 20 bp, Artificial Sequence
  Description of Artificial Sequence: Synthetic oligonucleotide
  Target: ANGPTL4; (-) strand; PAM type: YTN; PAM sequence: CTG
gctgccaagcaccaaacccc

SEQ ID NO: 14999 - DNA, 20 bp, Artificial Sequence
  Description of Artificial Sequence: Synthetic oligonucleotide
  Target: ANGPTL4; (-) strand; PAM type: YTN; PAM sequence: CTC
atctggctgccaagcaccaa

SEQ ID NO: 15000 - DNA, 20 bp, Artificial Sequence
  Description of Artificial Sequence: Synthetic oligonucleotide
  Target: ANGPTL4; (-) strand; PAM type: YTN; PAM sequence: CTC
cctcatctggctgccaagca

SEQ ID NO: 15001 - DNA, 20 bp, Artificial Sequence
  Description of Artificial Sequence: Synthetic oligonucleotide
  Target: ANGPTL4; (-) strand; PAM type: YTN; PAM sequence: TTC
acagacgaccccactccctc

SEQ ID NO: 15002 - DNA, 20 bp, Artificial Sequence
  Description of Artificial Sequence: Synthetic oligonucleotide
  Target: ANGPTL4; (-) strand; PAM type: YTN; PAM sequence: CTT
cacagacgaccccactccct

SEQ ID NO: 15003 - DNA, 20 bp, Artificial Sequence
  Description of Artificial Sequence: Synthetic oligonucleotide
  Target: ANGPTL4; (-) strand; PAM type: YTN; PAM sequence: CTC
ttcacagacgaccccactcc

SEQ ID NO: 15004 - DNA, 20 bp, Artificial Sequence
  Description of Artificial Sequence: Synthetic oligonucleotide
  Target: ANGPTL4; (-) strand; PAM type: YTN; PAM sequence: CTG
cccagaaaggtacaaggtca

SEQ ID NO: 15005 - DNA, 20 bp, Artificial Sequence
  Description of Artificial Sequence: Synthetic oligonucleotide
  Target: ANGPTL4; (-) strand; PAM type: YTN; PAM sequence: CTC
catctgcccagaaaggtaca

SEQ ID NO: 15006 - DNA, 20 bp, Artificial Sequence
  Description of Artificial Sequence: Synthetic oligonucleotide
  Target: ANGPTL4; (-) strand; PAM type: YTN; PAM sequence: CTG
tccagcctccatctgcccag

SEQ ID NO: 15007 - DNA, 20 bp, Artificial Sequence
  Description of Artificial Sequence: Synthetic oligonucleotide
  Target: ANGPTL4; (-) strand; PAM type: YTN; PAM sequence: TTA
ctgtccagcctccatctgcc

SEQ ID NO: 15008 - DNA, 20 bp, Artificial Sequence
  Description of Artificial Sequence: Synthetic oligonucleotide
  Target: ANGPTL4; (-) strand; PAM type: YTN; PAM sequence: CTG
aattactgtccagcctccat

SEQ ID NO: 15009 - DNA, 20 bp, Artificial Sequence
  Description of Artificial Sequence: Synthetic oligonucleotide
  Target: ANGPTL4; (-) strand; PAM type: YTN; PAM sequence: CTC
tgaattactgtccagcctcc

SEQ ID NO: 15010 - DNA, 20 bp, Artificial Sequence
  Description of Artificial Sequence: Synthetic oligonucleotide
  Target: ANGPTL4; (-) strand; PAM type: YTN; PAM sequence: CTG
agccatcgtggcgcctctga

SEQ ID NO: 15011 - DNA, 20 bp, Artificial Sequence
  Description of Artificial Sequence: Synthetic oligonucleotide
  Target: ANGPTL4; (-) strand; PAM type: YTN; PAM sequence: TTG
aagtccactgagccatcgtg

SEQ ID NO: 15012 - DNA, 20 bp, Artificial Sequence
  Description of Artificial Sequence: Synthetic oligonucleotide
  Target: ANGPTL4; (-) strand; PAM type: YTN; PAM sequence: TTC
ccagggccggttgaagtcca

SEQ ID NO: 15013 - DNA, 20 bp, Artificial Sequence
  Description of Artificial Sequence: Synthetic oligonucleotide
  Target: ANGPTL4; (-) strand; PAM type: YTN; PAM sequence: CTT
cccagggccggttgaagtcc

SEQ ID NO: 15014 - DNA, 20 bp, Artificial Sequence
  Description of Artificial Sequence: Synthetic oligonucleotide
  Target: ANGPTL4; (-) strand; PAM type: YTN; PAM sequence: TTG
taggcttcccagggccggtt

SEQ ID NO: 15015 - DNA, 20 bp, Artificial Sequence
  Description of Artificial Sequence: Synthetic oligonucleotide
  Target: ANGPTL4; (-) strand; PAM type: YTN; PAM sequence: CTT
gtaggcttcccagggccggt

SEQ ID NO: 15016 - DNA, 20 bp, Artificial Sequence
  Description of Artificial Sequence: Synthetic oligonucleotide
  Target: ANGPTL4; (-) strand; PAM type: YTN; PAM sequence: CTA
ccgtggggatccccaaaccc

SEQ ID NO: 15017 - DNA, 20 bp, Artificial Sequence
  Description of Artificial Sequence: Synthetic oligonucleotide
  Target: ANGPTL4; (-) strand; PAM type: YTN; PAM sequence: CTA
gaaacacctaccgtggggat

SEQ ID NO: 15018 - DNA, 20 bp, Artificial Sequence
  Description of Artificial Sequence: Synthetic oligonucleotide
  Target: ANGPTL4; (-) strand; PAM type: YTN; PAM sequence: CTG
tccccactagaaacacctac

SEQ ID NO: 15019 - DNA, 20 bp, Artificial Sequence
  Description of Artificial Sequence: Synthetic oligonucleotide
  Target: ANGPTL4; (-) strand; PAM type: YTN; PAM sequence: CTC
tgtccccactagaaacacct

SEQ ID NO: 15020 - DNA, 20 bp, Artificial Sequence
  Description of Artificial Sequence: Synthetic oligonucleotide
  Target: ANGPTL4; (-) strand; PAM type: YTN; PAM sequence: CTG
cctctgtccccactagaaac

SEQ ID NO: 15021 - DNA, 20 bp, Artificial Sequence
  Description of Artificial Sequence: Synthetic oligonucleotide
  Target: ANGPTL4; (-) strand; PAM type: YTN; PAM sequence: CTC
ccctgcctctgtccccacta

SEQ ID NO: 15022 - DNA, 20 bp, Artificial Sequence
  Description of Artificial Sequence: Synthetic oligonucleotide
  Target: ANGPTL4; (-) strand; PAM type: YTN; PAM sequence: TTC
ctcccctgcctctgtcccca

SEQ ID NO: 15023 - DNA, 20 bp, Artificial Sequence
  Description of Artificial Sequence: Synthetic oligonucleotide
  Target: ANGPTL4; (-) strand; PAM type: YTN; PAM sequence: CTT
cctcccctgcctctgtcccc

SEQ ID NO: 15024 - DNA, 20 bp, Artificial Sequence
  Description of Artificial Sequence: Synthetic oligonucleotide
  Target: ANGPTL4; (-) strand; PAM type: YTN; PAM sequence: CTC
ttcctcccctgcctctgtcc

SEQ ID NO: 15025 - DNA, 20 bp, Artificial Sequence
  Description of Artificial Sequence: Synthetic oligonucleotide
  Target: ANGPTL4; (-) strand; PAM type: YTN; PAM sequence: CTG
agggtccctcttcctcccct

SEQ ID NO: 15026 - DNA, 20 bp, Artificial Sequence
  Description of Artificial Sequence: Synthetic oligonucleotide
  Target: ANGPTL4; (-) strand; PAM type: YTN; PAM sequence: TTC
tgagggtccctcttcctccc

SEQ ID NO: 15027 - DNA, 20 bp, Artificial Sequence
  Description of Artificial Sequence: Synthetic oligonucleotide
  Target: ANGPTL4; (-) strand; PAM type: YTN; PAM sequence: CTT
ctgagggtccctcttcctcc

SEQ ID NO: 15028 - DNA, 20 bp, Artificial Sequence
  Description of Artificial Sequence: Synthetic oligonucleotide
  Target: ANGPTL4; (-) strand; PAM type: YTN; PAM sequence: CTC
catgaggcagggccacttct

SEQ ID NO: 15029 - DNA, 20 bp, Artificial Sequence
  Description of Artificial Sequence: Synthetic oligonucleotide
  Target: ANGPTL4; (-) strand; PAM type: YTN; PAM sequence: CTG
gagtgggagaggccactcca

SEQ ID NO: 15030 - DNA, 20 bp, Artificial Sequence
  Description of Artificial Sequence: Synthetic oligonucleotide
  Target: ANGPTL4; (-) strand; PAM type: YTN; PAM sequence: CTC
gcctggagtgggagaggcca

SEQ ID NO: 15031 - DNA, 20 bp, Artificial Sequence
  Description of Artificial Sequence: Synthetic oligonucleotide
  Target: ANGPTL4; (-) strand; PAM type: YTN; PAM sequence: CTC
cagacccagccagaactcgc

SEQ ID NO: 15032 - DNA, 20 bp, Artificial Sequence
  Description of Artificial Sequence: Synthetic oligonucleotide
  Target: ANGPTL4; (-) strand; PAM type: YTN; PAM sequence: TTC
tccagacccagccagaactc

SEQ ID NO: 15033 - DNA, 20 bp, Artificial Sequence
  Description of Artificial Sequence: Synthetic oligonucleotide
  Target: ANGPTL4; (-) strand; PAM type: YTN; PAM sequence: CTT
ctccagacccagccagaact

SEQ ID NO: 15034 - DNA, 20 bp, Artificial Sequence
  Description of Artificial Sequence: Synthetic oligonucleotide
  Target: ANGPTL4; (-) strand; PAM type: YTN; PAM sequence: CTA
tgcaccttctccagacccag

SEQ ID NO: 15035 - DNA, 20 bp, Artificial Sequence
  Description of Artificial Sequence: Synthetic oligonucleotide
  Target: ANGPTL4; (-) strand; PAM type: YTN; PAM sequence: TTG
cggtcccccgtgatgctatg

SEQ ID NO: 15036 - DNA, 20 bp, Artificial Sequence
  Description of Artificial Sequence: Synthetic oligonucleotide
  Target: ANGPTL4; (-) strand; PAM type: YTN; PAM sequence: CTG
ttgcggtcccccgtgatgct

SEQ ID NO: 15037 - DNA, 20 bp, Artificial Sequence
  Description of Artificial Sequence: Synthetic oligonucleotide
  Target: ANGPTL4; (-) strand; PAM type: YTN; PAM sequence: CTG
cacggccaggcggctgttgc

SEQ ID NO: 15038 - DNA, 20 bp, Artificial Sequence
  Description of Artificial Sequence: Synthetic oligonucleotide
  Target: ANGPTL4; (-) strand; PAM type: YTN; PAM sequence: TTG
ccatcccagtcccgcagctg

SEQ ID NO: 15039 - DNA, 20 bp, Artificial Sequence
  Description of Artificial Sequence: Synthetic oligonucleotide
  Target: ANGPTL4; (-) strand; PAM type: YTN; PAM sequence: CTC
ggcgttgccatcccagtccc

SEQ ID NO: 15040 - DNA, 20 bp, Artificial Sequence
  Description of Artificial Sequence: Synthetic oligonucleotide
  Target: ANGPTL4; (-) strand; PAM type: YTN; PAM sequence: CTG
cagcaactcggcgttgccat

SEQ ID NO: 15041 - DNA, 20 bp, Artificial Sequence
  Description of Artificial Sequence: Synthetic oligonucleotide
  Target: ANGPTL4; (-) strand; PAM type: YTN; PAM sequence: CTC
gccacccaggtgcacggaga

SEQ ID NO: 15042 - DNA, 20 bp, Artificial Sequence
  Description of Artificial Sequence: Synthetic oligonucleotide
  Target: ANGPTL4; (-) strand; PAM type: YTN; PAM sequence: CTA
taggccgtgtcctcgccacc

SEQ ID NO: 15043 - DNA, 20 bp, Artificial Sequence
  Description of Artificial Sequence: Synthetic oligonucleotide
  Target: ANGPTL4; (-) strand; PAM type: YTN; PAM sequence: CTG
caggctataggccgtgtcct

SEQ ID NO: 15044 - DNA, 20 bp, Artificial Sequence
  Description of Artificial Sequence: Synthetic oligonucleotide
  Target: ANGPTL4; (-) strand; PAM type: YTN; PAM sequence: CTG
gccggccacgggtgcagtga

SEQ ID NO: 15045 - DNA, 20 bp, Artificial Sequence
  Description of Artificial Sequence: Synthetic oligonucleotide
  Target: ANGPTL4; (-) strand; PAM type: YTN; PAM sequence: CTG
ggtgggacggtggtggcgcc

SEQ ID NO: 15046 - DNA, 20 bp, Artificial Sequence
  Description of Artificial Sequence: Synthetic oligonucleotide
  Target: ANGPTL4; (-) strand; PAM type: YTN; PAM sequence: CTG
gtcccaagtggagaagggta

SEQ ID NO: 15047 - DNA, 20 bp, Artificial Sequence
  Description of Artificial Sequence: Synthetic oligonucleotide
  Target: ANGPTL4; (-) strand; PAM type: YTN; PAM sequence: CTG
cggaggtcgtgatcctggtc

SEQ ID NO: 15048 - DNA, 20 bp, Artificial Sequence
  Description of Artificial Sequence: Synthetic oligonucleotide
  Target: ANGPTL4; (-) strand; PAM type: YTN; PAM sequence: TTG
tccctgcggaggtcgtgatc

SEQ ID NO: 15049 - DNA, 20 bp, Artificial Sequence
  Description of Artificial Sequence: Synthetic oligonucleotide
  Target: ANGPTL4; (-) strand; PAM type: YTN; PAM sequence: CTT
gtccctgcggaggtcgtgat

SEQ ID NO: 15050 - DNA, 20 bp, Artificial Sequence
  Description of Artificial Sequence: Synthetic oligonucleotide
  Target: ANGPTL4; (-) strand; PAM type: YTN; PAM sequence: TTC
ttgtccctgcggaggtcgtg

SEQ ID NO: 15051 - DNA, 20 bp, Artificial Sequence
  Description of Artificial Sequence: Synthetic oligonucleotide
  Target: ANGPTL4; (-) strand; PAM type: YTN; PAM sequence: TTG
gcgcagttcttgtccctgcg

SEQ ID NO: 15052 - DNA, 20 bp, Artificial Sequence
  Description of Artificial Sequence: Synthetic oligonucleotide
  Target: ANGPTL4; (-) strand; PAM type: YTN; PAM sequence: CTT
ggcgcagttcttgtccctgc

SEQ ID NO: 15053 - DNA, 20 bp, Artificial Sequence
  Description of Artificial Sequence: Synthetic oligonucleotide
  Target: ANGPTL4; (-) strand; PAM type: YTN; PAM sequence: CTC
ttggcgcagttcttgtccct

SEQ ID NO: 15054 - DNA, 20 bp, Artificial Sequence
  Description of Artificial Sequence: Synthetic oligonucleotide
  Target: ANGPTL4; (-) strand; PAM type: YTN; PAM sequence: CTC
accagagaggctcttggcgc

SEQ ID NO: 15055 - DNA, 20 bp, Artificial Sequence
  Description of Artificial Sequence: Synthetic oligonucleotide
  Target: ANGPTL4; (-) strand; PAM type: YTN; PAM sequence: CTG
ctcaccagagaggctcttgg

SEQ ID NO: 15056 - DNA, 20 bp, Artificial Sequence
  Description of Artificial Sequence: Synthetic oligonucleotide
  Target: ANGPTL4; (-) strand; PAM type: YTN; PAM sequence: CTG
ggtgtggcatggcagggcct

SEQ ID NO: 15057 - DNA, 20 bp, Artificial Sequence
  Description of Artificial Sequence: Synthetic oligonucleotide
  Target: ANGPTL4; (-) strand; PAM type: YTN; PAM sequence: CTG
gctgggtgtggcatggcagg

SEQ ID NO: 15058 - DNA, 20 bp, Artificial Sequence
  Description of Artificial Sequence: Synthetic oligonucleotide
  Target: ANGPTL4; (-) strand; PAM type: YTN; PAM sequence: CTG
ctggctgggtgtggcatggc

SEQ ID NO: 15059 - DNA, 20 bp, Artificial Sequence
  Description of Artificial Sequence: Synthetic oligonucleotide
  Target: ANGPTL4; (-) strand; PAM type: YTN; PAM sequence: TTG
aaggcaggacagagcagcag

SEQ ID NO: 15060 - DNA, 20 bp, Artificial Sequence
  Description of Artificial Sequence: Synthetic oligonucleotide
  Target: ANGPTL4; (-) strand; PAM type: YTN; PAM sequence: TTA
gtggcccaatcacacacacg

SEQ ID NO: 15061 - DNA, 20 bp, Artificial Sequence
  Description of Artificial Sequence: Synthetic oligonucleotide
  Target: ANGPTL4; (-) strand; PAM type: YTN; PAM sequence: CTA
agttagtggcccaatcacac

SEQ ID NO: 15062 - DNA, 20 bp, Artificial Sequence
  Description of Artificial Sequence: Synthetic oligonucleotide
  Target: ANGPTL4; (-) strand; PAM type: YTN; PAM sequence: CTG
aggccagataggctaagtta

SEQ ID NO: 15063 - DNA, 20 bp, Artificial Sequence
  Description of Artificial Sequence: Synthetic oligonucleotide
  Target: ANGPTL4; (-) strand; PAM type: YTN; PAM sequence: TTC
aggatgggaaaactgaggcc

SEQ ID NO: 15064 - DNA, 20 bp, Artificial Sequence
  Description of Artificial Sequence: Synthetic oligonucleotide
  Target: ANGPTL4; (-) strand; PAM type: YTN; PAM sequence: TTT
caggatgggaaaactgaggc

SEQ ID NO: 15065 - DNA, 20 bp, Artificial Sequence
  Description of Artificial Sequence: Synthetic oligonucleotide
  Target: ANGPTL4; (-) strand; PAM type: YTN; PAM sequence: TTT
tcaggatgggaaaactgagg

SEQ ID NO: 15066 - DNA, 20 bp, Artificial Sequence
  Description of Artificial Sequence: Synthetic oligonucleotide
  Target: ANGPTL4; (-) strand; PAM type: YTN; PAM sequence: CTT
ttcaggatgggaaaactgag

SEQ ID NO: 15067 - DNA, 20 bp, Artificial Sequence
  Description of Artificial Sequence: Synthetic oligonucleotide
  Target: ANGPTL4; (-) strand; PAM type: YTN; PAM sequence: CTC
aaaaaataaatacataaata

SEQ ID NO: 15068 - DNA, 20 bp, Artificial Sequence
  Description of Artificial Sequence: Synthetic oligonucleotide
  Target: ANGPTL4; (-) strand; PAM type: YTN; PAM sequence: CTC
cgtctcaaaaaataaataca

SEQ ID NO: 15069 - DNA, 20 bp, Artificial Sequence
  Description of Artificial Sequence: Synthetic oligonucleotide
  Target: ANGPTL4; (-) strand; PAM type: YTN; PAM sequence: CTG
ggtgacaaagtgagactccg

SEQ ID NO: 15070 - DNA, 20 bp, Artificial Sequence
  Description of Artificial Sequence: Synthetic oligonucleotide
  Target: ANGPTL4; (-) strand; PAM type: YTN; PAM sequence: CTC
cagcctgggtgacaaagtga

SEQ ID NO: 15071 - DNA, 20 bp, Artificial Sequence
  Description of Artificial Sequence: Synthetic oligonucleotide
  Target: ANGPTL4; (-) strand; PAM type: YTN; PAM sequence: TTG
cagtgagccaagatcgtgcc

SEQ ID NO: 15072 - DNA, 20 bp, Artificial Sequence
  Description of Artificial Sequence: Synthetic oligonucleotide
  Target: ANGPTL4; (-) strand; PAM type: YTN; PAM sequence: CTT
gcagtgagccaagatcgtgc

SEQ ID NO: 15073 - DNA, 20 bp, Artificial Sequence
  Description of Artificial Sequence: Synthetic oligonucleotide
  Target: ANGPTL4; (-) strand; PAM type: YTN; PAM sequence: CTC
aggaggtggagcttgcagtg

SEQ ID NO: 15074 - DNA, 20 bp, Artificial Sequence
  Description of Artificial Sequence: Synthetic oligonucleotide
  Target: ANGPTL4; (-) strand; PAM type: YTN; PAM sequence: CTG
aggcaggagaatggtgtgaa

SEQ ID NO: 15075 - DNA, 20 bp, Artificial Sequence
  Description of Artificial Sequence: Synthetic oligonucleotide
  Target: ANGPTL4; (-) strand; PAM type: YTN; PAM sequence: CTC
gggaggctgaggcaggagaa

SEQ ID NO: 15076 - DNA, 20 bp, Artificial Sequence
  Description of Artificial Sequence: Synthetic oligonucleotide
  Target: ANGPTL4; (-) strand; PAM type: YTN; PAM sequence: CTA
ctcgggaggctgaggcagga

SEQ ID NO: 15077 - DNA, 20 bp, Artificial Sequence
  Description of Artificial Sequence: Synthetic oligonucleotide
  Target: ANGPTL4; (-) strand; PAM type: YTN; PAM sequence: CTA
tagtcccagctactcgggag

SEQ ID NO: 15078 - DNA, 20 bp, Artificial Sequence
  Description of Artificial Sequence: Synthetic oligonucleotide
  Target: ANGPTL4; (-) strand; PAM type: YTN; PAM sequence: TTA
gccaggcgtggtggtgggca

SEQ ID NO: 15079 - DNA, 20 bp, Artificial Sequence
  Description of Artificial Sequence: Synthetic oligonucleotide
  Target: ANGPTL4; (-) strand; PAM type: YTN; PAM sequence: CTA
aaaatacaaaaaaattagcc

SEQ ID NO: 15080 - DNA, 20 bp, Artificial Sequence
  Description of Artificial Sequence: Synthetic oligonucleotide
  Target: ANGPTL4; (-) strand; PAM type: YTN; PAM sequence: CTA
ctaaaaatacaaaaaaatta

SEQ ID NO: 15081 - DNA, 20 bp, Artificial Sequence
  Description of Artificial Sequence: Synthetic oligonucleotide
  Target: ANGPTL4; (-) strand; PAM type: YTN; PAM sequence: CTC
tactaaaaatacaaaaaaat

SEQ ID NO: 15082 - DNA, 20 bp, Artificial Sequence
  Description of Artificial Sequence: Synthetic oligonucleotide
  Target: ANGPTL4; (-) strand; PAM type: YTN; PAM sequence: CTA
acacggtgaaaccccatctc

SEQ ID NO: 15083 - DNA, 20 bp, Artificial Sequence
  Description of Artificial Sequence: Synthetic oligonucleotide
  Target: ANGPTL4; (-) strand; PAM type: YTN; PAM sequence: CTG
gctaacacggtgaaacccca

SEQ ID NO: 15084 - DNA, 20 bp, Artificial Sequence
  Description of Artificial Sequence: Synthetic oligonucleotide
  Target: ANGPTL4; (-) strand; PAM type: YTN; PAM sequence: CTG
aggcaggcagatcacgaggt

SEQ ID NO: 15085 - DNA, 20 bp, Artificial Sequence
  Description of Artificial Sequence: Synthetic oligonucleotide
  Target: ANGPTL4; (-) strand; PAM type: YTN; PAM sequence: TTG
ggaggctgaggcaggcagat

SEQ ID NO: 15086 - DNA, 20 bp, Artificial Sequence
  Description of Artificial Sequence: Synthetic oligonucleotide
  Target: ANGPTL4; (-) strand; PAM type: YTN; PAM sequence: TTT
gggaggctgaggcaggcaga

SEQ ID NO: 15087 - DNA, 20 bp, Artificial Sequence
  Description of Artificial Sequence: Synthetic oligonucleotide
  Target: ANGPTL4; (-) strand; PAM type: YTN; PAM sequence: CTT
tgggaggctgaggcaggcag

SEQ ID NO: 15088 - DNA, 20 bp, Artificial Sequence
  Description of Artificial Sequence: Synthetic oligonucleotide
  Target: ANGPTL4; (-) strand; PAM type: YTN; PAM sequence: CTG
taatcccagcactttgggag

SEQ ID NO: 15089 - DNA, 20 bp, Artificial Sequence
  Description of Artificial Sequence: Synthetic oligonucleotide
  Target: ANGPTL4; (-) strand; PAM type: YTN; PAM sequence: CTC
acgcctgtaatcccagcact

SEQ ID NO: 15090 - DNA, 20 bp, Artificial Sequence
  Description of Artificial Sequence: Synthetic oligonucleotide
  Target: ANGPTL4; (-) strand; PAM type: YTN; PAM sequence: CTC
aaaaaataaataagtaggcc

SEQ ID NO: 15091 - DNA, 20 bp, Artificial Sequence
  Description of Artificial Sequence: Synthetic oligonucleotide
  Target: ANGPTL4; (-) strand; PAM type: YTN; PAM sequence: CTG
tctcaaaaaataaataagta

SEQ ID NO: 15092 - DNA, 20 bp, Artificial Sequence
  Description of Artificial Sequence: Synthetic oligonucleotide
  Target: ANGPTL4; (-) strand; PAM type: YTN; PAM sequence: CTC
tgtctcaaaaaataaataag

SEQ ID NO: 15093 - DNA, 20 bp, Artificial Sequence
  Description of Artificial Sequence: Synthetic oligonucleotide
  Target: ANGPTL4; (-) strand; PAM type: YTN; PAM sequence: CTG
ggagacacagcgggactctg

SEQ ID NO: 15094 - DNA, 20 bp, Artificial Sequence
  Description of Artificial Sequence: Synthetic oligonucleotide
  Target: ANGPTL4; (-) strand; PAM type: YTN; PAM sequence: CTC
cagcctgggagacacagcgg

SEQ ID NO: 15095 - DNA, 20 bp, Artificial Sequence
  Description of Artificial Sequence: Synthetic oligonucleotide
  Target: ANGPTL4; (-) strand; PAM type: YTN; PAM sequence: TTG
cactccagcctgggagacac

SEQ ID NO: 15096 - DNA, 20 bp, Artificial Sequence
  Description of Artificial Sequence: Synthetic oligonucleotide
  Target: ANGPTL4; (-) strand; PAM type: YTN; PAM sequence: CTT
gcactccagcctgggagaca

SEQ ID NO: 15097 - DNA, 20 bp, Artificial Sequence
  Description of Artificial Sequence: Synthetic oligonucleotide
  Target: ANGPTL4; (-) strand; PAM type: YTN; PAM sequence: CTG
cagtgagccaagatcacgtc

SEQ ID NO: 15098 - DNA, 20 bp, Artificial Sequence
  Description of Artificial Sequence: Synthetic oligonucleotide
  Target: ANGPTL4; (-) strand; PAM type: YTN; PAM sequence: TTG
aacccaggaggcggaggctg

SEQ ID NO: 15099 - DNA, 20 bp, Artificial Sequence
  Description of Artificial Sequence: Synthetic oligonucleotide
  Target: ANGPTL4; (-) strand; PAM type: YTN; PAM sequence: CTT
gaacccaggaggcggaggct

SEQ ID NO: 15100 - DNA, 20 bp, Artificial Sequence
  Description of Artificial Sequence: Synthetic oligonucleotide
  Target: ANGPTL4; (-) strand; PAM type: YTN; PAM sequence: CTG
aggcaggagaatcacttgaa

SEQ ID NO: 15101 - DNA, 20 bp, Artificial Sequence
  Description of Artificial Sequence: Synthetic oligonucleotide
  Target: ANGPTL4; (-) strand; PAM type: YTN; PAM sequence: CTC
aggaggctgaggcaggagaa

SEQ ID NO: 15102 - DNA, 20 bp, Artificial Sequence
  Description of Artificial Sequence: Synthetic oligonucleotide
  Target: ANGPTL4; (-) strand; PAM type: YTN; PAM sequence: CTA
ctcaggaggctgaggcagga

SEQ ID NO: 15103 - DNA, 20 bp, Artificial Sequence
  Description of Artificial Sequence: Synthetic oligonucleotide
  Target: ANGPTL4; (-) strand; PAM type: YTN; PAM sequence: CTG
taatcccagctactcaggag

SEQ ID NO: 15104 - DNA, 20 bp, Artificial Sequence
  Description of Artificial Sequence: Synthetic oligonucleotide
  Target: ANGPTL4; (-) strand; PAM type: YTN; PAM sequence: CTG
tgcatggtggcgggaacctg

SEQ ID NO: 15105 - DNA, 20 bp, Artificial Sequence
  Description of Artificial Sequence: Synthetic oligonucleotide
  Target: ANGPTL4; (-) strand; PAM type: YTN; PAM sequence: TTA
tctgtgcatggtggcgggaa

SEQ ID NO: 15106 - DNA, 20 bp, Artificial Sequence
  Description of Artificial Sequence: Synthetic oligonucleotide
  Target: ANGPTL4; (-) strand; PAM type: YTN; PAM sequence: CTA
aaaatacaaaacaattatct

SEQ ID NO: 15107 - DNA, 20 bp, Artificial Sequence
  Description of Artificial Sequence: Synthetic oligonucleotide
  Target: ANGPTL4; (-) strand; PAM type: YTN; PAM sequence: CTA
ctaaaaatacaaaacaatta

SEQ ID NO: 15108 - DNA, 20 bp, Artificial Sequence
  Description of Artificial Sequence: Synthetic oligonucleotide
  Target: ANGPTL4; (-) strand; PAM type: YTN; PAM sequence: CTC
tactaaaaatacaaaacaat

SEQ ID NO: 15109 - DNA, 20 bp, Artificial Sequence
  Description of Artificial Sequence: Synthetic oligonucleotide
  Target: ANGPTL4; (-) strand; PAM type: YTN; PAM sequence: CTG
gccaacatggtgaaaccccg

SEQ ID NO: 15110 - DNA, 20 bp, Artificial Sequence
  Description of Artificial Sequence: Synthetic oligonucleotide
  Target: ANGPTL4; (-) strand; PAM type: YTN; PAM sequence: TTC
aagaccaccctggccaacat

SEQ ID NO: 15111 - DNA, 20 bp, Artificial Sequence
  Description of Artificial Sequence: Synthetic oligonucleotide
  Target: ANGPTL4; (-) strand; PAM type: YTN; PAM sequence: TTG
aggtcaggagttcaagacca

SEQ ID NO: 15112 - DNA, 20 bp, Artificial Sequence
  Description of Artificial Sequence: Synthetic oligonucleotide
  Target: ANGPTL4; (-) strand; PAM type: YTN; PAM sequence: CTT
gaggtcaggagttcaagacc

SEQ ID NO: 15113 - DNA, 20 bp, Artificial Sequence
  Description of Artificial Sequence: Synthetic oligonucleotide
  Target: ANGPTL4; (-) strand; PAM type: YTN; PAM sequence: TTG
ggaggccgaggtgggcagat

SEQ ID NO: 15114 - DNA, 20 bp, Artificial Sequence
  Description of Artificial Sequence: Synthetic oligonucleotide
  Target: ANGPTL4; (-) strand; PAM type: YTN; PAM sequence: TTT
gggaggccgaggtgggcaga

SEQ ID NO: 15115 - DNA, 20 bp, Artificial Sequence
  Description of Artificial Sequence: Synthetic oligonucleotide
  Target: ANGPTL4; (-) strand; PAM type: YTN; PAM sequence: CTT
tgggaggccgaggtgggcag

SEQ ID NO: 15116 - DNA, 20 bp, Artificial Sequence
  Description of Artificial Sequence: Synthetic oligonucleotide
  Target: ANGPTL4; (-) strand; PAM type: YTN; PAM sequence: CTG
taatcccaacactttgggag

SEQ ID NO: 15117 - DNA, 20 bp, Artificial Sequence
  Description of Artificial Sequence: Synthetic oligonucleotide
  Target: ANGPTL4; (-) strand; PAM type: YTN; PAM sequence: CTC
acgcctgtaatcccaacact

SEQ ID NO: 15118 - DNA, 20 bp, Artificial Sequence
  Description of Artificial Sequence: Synthetic oligonucleotide
  Target: ANGPTL4; (-) strand; PAM type: YTN; PAM sequence: TTG
tggctcacgcctgtaatccc

SEQ ID NO: 15119 - DNA, 20 bp, Artificial Sequence
  Description of Artificial Sequence: Synthetic oligonucleotide
  Target: ANGPTL4; (-) strand; PAM type: YTN; PAM sequence: TTG
tggccgggtattgtggctca

SEQ ID NO: 15120 - DNA, 20 bp, Artificial Sequence
  Description of Artificial Sequence: Synthetic oligonucleotide
  Target: ANGPTL4; (-) strand; PAM type: YTN; PAM sequence: TTT
gtggccgggtattgtggctc

SEQ ID NO: 15121 - DNA, 20 bp, Artificial Sequence
  Description of Artificial Sequence: Synthetic oligonucleotide
  Target: ANGPTL4; (-) strand; PAM type: YTN; PAM sequence: TTA
taaagatgtttgtggccggg

SEQ ID NO: 15122 - DNA, 20 bp, Artificial Sequence
  Description of Artificial Sequence: Synthetic oligonucleotide
  Target: ANGPTL4; (-) strand; PAM type: YTN; PAM sequence: CTG
tggagcaccattataaagat

SEQ ID NO: 15123 - DNA, 20 bp, Artificial Sequence
  Description of Artificial Sequence: Synthetic oligonucleotide
  Target: ANGPTL4; (-) strand; PAM type: YTN; PAM sequence: TTC
aaaaaaaaaaaaaaaaaaag

SEQ ID NO: 15124 - DNA, 20 bp, Artificial Sequence
  Description of Artificial Sequence: Synthetic oligonucleotide
  Target: ANGPTL4; (-) strand; PAM type: YTN; PAM sequence: TTT
caaaaaaaaaaaaaaaaaaa

SEQ ID NO: 15125 - DNA, 20 bp, Artificial Sequence
  Description of Artificial Sequence: Synthetic oligonucleotide
  Target: ANGPTL4; (-) strand; PAM type: YTN; PAM sequence: CTG
tttcaaaaaaaaaaaaaaaa

SEQ ID NO: 15126 - DNA, 20 bp, Artificial Sequence
  Description of Artificial Sequence: Synthetic oligonucleotide
  Target: ANGPTL4; (-) strand; PAM type: YTN; PAM sequence: TTA
ggcaacagagtgagaccctg

SEQ ID NO: 15127 - DNA, 20 bp, Artificial Sequence
  Description of Artificial Sequence: Synthetic oligonucleotide
  Target: ANGPTL4; (-) strand; PAM type: YTN; PAM sequence: CTT
aggcaacagagtgagaccct

SEQ ID NO: 15128 - DNA, 20 bp, Artificial Sequence
  Description of Artificial Sequence: Synthetic oligonucleotide
  Target: ANGPTL4; (-) strand; PAM type: YTN; PAM sequence: CTC
cagcttaggcaacagagtga

SEQ ID NO: 15129 - DNA, 20 bp, Artificial Sequence
  Description of Artificial Sequence: Synthetic oligonucleotide
  Target: ANGPTL4; (-) strand; PAM type: YTN; PAM sequence: CTG
cactccagcttaggcaacag

SEQ ID NO: 15130 - DNA, 20 bp, Artificial Sequence
  Description of Artificial Sequence: Synthetic oligonucleotide
  Target: ANGPTL4; (-) strand; PAM type: YTN; PAM sequence: TTG
cagtgagccgagatcgcacc

SEQ ID NO: 15131 - DNA, 20 bp, Artificial Sequence
  Description of Artificial Sequence: Synthetic oligonucleotide
  Target: ANGPTL4; (-) strand; PAM type: YTN; PAM sequence: TTG
aacccgggaggtggaggttg

SEQ ID NO: 15132 - DNA, 20 bp, Artificial Sequence
  Description of Artificial Sequence: Synthetic oligonucleotide
  Target: ANGPTL4; (-) strand; PAM type: YTN; PAM sequence: CTT
gaacccgggaggtggaggtt

SEQ ID NO: 15133 - DNA, 20 bp, Artificial Sequence
  Description of Artificial Sequence: Synthetic oligonucleotide
  Target: ANGPTL4; (-) strand; PAM type: YTN; PAM sequence: TTG
cttgaacccgggaggtggag

SEQ ID NO: 15134 - DNA, 20 bp, Artificial Sequence
  Description of Artificial Sequence: Synthetic oligonucleotide
  Target: ANGPTL4; (-) strand; PAM type: YTN; PAM sequence: TTG
agaattgcttgaacccggga

SEQ ID NO: 15135 - DNA, 20 bp, Artificial Sequence
  Description of Artificial Sequence: Synthetic oligonucleotide
  Target: ANGPTL4; (-) strand; PAM type: YTN; PAM sequence: TTT
gagaattgcttgaacccggg

SEQ ID NO: 15136 - DNA, 20 bp, Artificial Sequence
  Description of Artificial Sequence: Synthetic oligonucleotide
  Target: ANGPTL4; (-) strand; PAM type: YTN; PAM sequence: TTT
tgagaattgcttgaacccgg

SEQ ID NO: 15137 - DNA, 20 bp, Artificial Sequence
  Description of Artificial Sequence: Synthetic oligonucleotide
  Target: ANGPTL4; (-) strand; PAM type: YTN; PAM sequence: TTT
ttgagaattgcttgaacccg

SEQ ID NO: 15138 - DNA, 20 bp, Artificial Sequence
  Description of Artificial Sequence: Synthetic oligonucleotide
  Target: ANGPTL4; (-) strand; PAM type: YTN; PAM sequence: TTT
tttgagaattgcttgaaccc

SEQ ID NO: 15139 - DNA, 20 bp, Artificial Sequence
  Description of Artificial Sequence: Synthetic oligonucleotide
  Target: ANGPTL4; (-) strand; PAM type: YTN; PAM sequence: TTT
ttttgagaattgcttgaacc

SEQ ID NO: 15140 - DNA, 20 bp, Artificial Sequence
  Description of Artificial Sequence: Synthetic oligonucleotide
  Target: ANGPTL4; (-) strand; PAM type: YTN; PAM sequence: TTT
tttttgagaattgcttgaac

SEQ ID NO: 15141 - DNA, 20 bp, Artificial Sequence
  Description of Artificial Sequence: Synthetic oligonucleotide
  Target: ANGPTL4; (-) strand; PAM type: YTN; PAM sequence: TTT
ttttttgagaattgcttgaa

SEQ ID NO: 15142 - DNA, 20 bp, Artificial Sequence
  Description of Artificial Sequence: Synthetic oligonucleotide
  Target: ANGPTL4; (-) strand; PAM type: YTN; PAM sequence: TTT
tttttttgagaattgcttga

SEQ ID NO: 15143 - DNA, 20 bp, Artificial Sequence
  Description of Artificial Sequence: Synthetic oligonucleotide
  Target: ANGPTL4; (-) strand; PAM type: YTN; PAM sequence: TTT
ttttttttgagaattgcttg

SEQ ID NO: 15144 - DNA, 20 bp, Artificial Sequence
  Description of Artificial Sequence: Synthetic oligonucleotide
  Target: ANGPTL4; (-) strand; PAM type: YTN; PAM sequence: TTT
tttttttttgagaattgctt

SEQ ID NO: 15145 - DNA, 20 bp, Artificial Sequence
  Description of Artificial Sequence: Synthetic oligonucleotide
  Target: ANGPTL4; (-) strand; PAM type: YTN; PAM sequence: TTT
ttttttttttgagaattgct

SEQ ID NO: 15146 - DNA, 20 bp, Artificial Sequence
  Description of Artificial Sequence: Synthetic oligonucleotide
  Target: ANGPTL4; (-) strand; PAM type: YTN; PAM sequence: TTT
tttttttttttgagaattgc

SEQ ID NO: 15147 - DNA, 20 bp, Artificial Sequence
  Description of Artificial Sequence: Synthetic oligonucleotide
  Target: ANGPTL4; (-) strand; PAM type: YTN; PAM sequence: TTT
ttttttttttttgagaattg

SEQ ID NO: 15148 - DNA, 20 bp, Artificial Sequence
  Description of Artificial Sequence: Synthetic oligonucleotide
  Target: ANGPTL4; (-) strand; PAM type: YTN; PAM sequence: CTA
atttttttttttttttgaga

SEQ ID NO: 15149 - DNA, 20 bp, Artificial Sequence
  Description of Artificial Sequence: Synthetic oligonucleotide
  Target: ANGPTL4; (-) strand; PAM type: YTN; PAM sequence: TTG
caagtgtgagccaccgtgcc

SEQ ID NO: 15150 - DNA, 20 bp, Artificial Sequence
  Description of Artificial Sequence: Synthetic oligonucleotide
  Target: ANGPTL4; (-) strand; PAM type: YTN; PAM sequence: CTG
ggattgcaagtgtgagccac

SEQ ID NO: 15151 - DNA, 20 bp, Artificial Sequence
  Description of Artificial Sequence: Synthetic oligonucleotide
  Target: ANGPTL4; (-) strand; PAM type: YTN; PAM sequence: CTC
ccaaagtgctgggattgcaa

SEQ ID NO: 15152 - DNA, 20 bp, Artificial Sequence
  Description of Artificial Sequence: Synthetic oligonucleotide
  Target: ANGPTL4; (-) strand; PAM type: YTN; PAM sequence: TTC
agcctcccaaagtgctggga

SEQ ID NO: 15153 - DNA, 20 bp, Artificial Sequence
  Description of Artificial Sequence: Synthetic oligonucleotide
  Target: ANGPTL4; (-) strand; PAM type: YTN; PAM sequence: CTT
cagcctcccaaagtgctggg

SEQ ID NO: 15154 - DNA, 20 bp, Artificial Sequence
  Description of Artificial Sequence: Synthetic oligonucleotide
  Target: ANGPTL4; (-) strand; PAM type: YTN; PAM sequence: CTC
gcttcagcctcccaaagtgc

SEQ ID NO: 15155 - DNA, 20 bp, Artificial Sequence
  Description of Artificial Sequence: Synthetic oligonucleotide
  Target: ANGPTL4; (-) strand; PAM type: YTN; PAM sequence: CTC
aagtgatccactcgcttcag

SEQ ID NO: 15156 - DNA, 20 bp, Artificial Sequence
  Description of Artificial Sequence: Synthetic oligonucleotide
  Target: ANGPTL4; (-) strand; PAM type: YTN; PAM sequence: CTG
ggctcaagtgatccactcgc

SEQ ID NO: 15157 - DNA, 20 bp, Artificial Sequence
  Description of Artificial Sequence: Synthetic oligonucleotide
  Target: ANGPTL4; (-) strand; PAM type: YTN; PAM sequence: CTC
ctgggctcaagtgatccact

SEQ ID NO: 15158 - DNA, 20 bp, Artificial Sequence
  Description of Artificial Sequence: Synthetic oligonucleotide
  Target: ANGPTL4; (-) strand; PAM type: YTN; PAM sequence: TTG
gtctcctgggctcaagtgat

SEQ ID NO: 15159 - DNA, 20 bp, Artificial Sequence
  Description of Artificial Sequence: Synthetic oligonucleotide
  Target: ANGPTL4; (-) strand; PAM type: YTN; PAM sequence: CTC
agattggtctcctgggctca

SEQ ID NO: 15160 - DNA, 20 bp, Artificial Sequence
  Description of Artificial Sequence: Synthetic oligonucleotide
  Target: ANGPTL4; (-) strand; PAM type: YTN; PAM sequence: TTG
ctcagattggtctcctgggc

SEQ ID NO: 15161 - DNA, 20 bp, Artificial Sequence
  Description of Artificial Sequence: Synthetic oligonucleotide
  Target: ANGPTL4; (-) strand; PAM type: YTN; PAM sequence: CTG
ttgctcagattggtctcctg

SEQ ID NO: 15162 - DNA, 20 bp, Artificial Sequence
  Description of Artificial Sequence: Synthetic oligonucleotide
  Target: ANGPTL4; (-) strand; PAM type: YTN; PAM sequence: TTC
gccctgttgctcagattggt

SEQ ID NO: 15163 - DNA, 20 bp, Artificial Sequence
  Description of Artificial Sequence: Synthetic oligonucleotide
  Target: ANGPTL4; (-) strand; PAM type: YTN; PAM sequence: TTT
cgccctgttgctcagattgg

SEQ ID NO: 15164 - DNA, 20 bp, Artificial Sequence
  Description of Artificial Sequence: Synthetic oligonucleotide
  Target: ANGPTL4; (-) strand; PAM type: YTN; PAM sequence: TTG
agacaggatttcgccctgtt

SEQ ID NO: 15165 - DNA, 20 bp, Artificial Sequence
  Description of Artificial Sequence: Synthetic oligonucleotide
  Target: ANGPTL4; (-) strand; PAM type: YTN; PAM sequence: TTA
attgagacaggatttcgccc

SEQ ID NO: 15166 - DNA, 20 bp, Artificial Sequence
  Description of Artificial Sequence: Synthetic oligonucleotide
  Target: ANGPTL4; (-) strand; PAM type: YTN; PAM sequence: TTT
aattgagacaggatttcgcc

SEQ ID NO: 15167 - DNA, 20 bp, Artificial Sequence
  Description of Artificial Sequence: Synthetic oligonucleotide
  Target: ANGPTL4; (-) strand; PAM type: YTN; PAM sequence: TTT
taattgagacaggatttcgc

SEQ ID NO: 15168 - DNA, 20 bp, Artificial Sequence
  Description of Artificial Sequence: Synthetic oligonucleotide
  Target: ANGPTL4; (-) strand; PAM type: YTN; PAM sequence: TTT
ttaattgagacaggatttcg

SEQ ID NO: 15169 - DNA, 20 bp, Artificial Sequence
  Description of Artificial Sequence: Synthetic oligonucleotide
  Target: ANGPTL4; (-) strand; PAM type: YTN; PAM sequence: TTG
tatttttaattgagacagga

SEQ ID NO: 15170 - DNA, 20 bp, Artificial Sequence
  Description of Artificial Sequence: Synthetic oligonucleotide
  Target: ANGPTL4; (-) strand; PAM type: YTN; PAM sequence: TTT
gtatttttaattgagacagg

SEQ ID NO: 15171 - DNA, 20 bp, Artificial Sequence
  Description of Artificial Sequence: Synthetic oligonucleotide
  Target: ANGPTL4; (-) strand; PAM type: YTN; PAM sequence: TTT
tgtatttttaattgagacag

SEQ ID NO: 15172 - DNA, 20 bp, Artificial Sequence
  Description of Artificial Sequence: Synthetic oligonucleotide
  Target: ANGPTL4; (-) strand; PAM type: YTN; PAM sequence: TTT
ttgtatttttaattgagaca

SEQ ID NO: 15173 - DNA, 20 bp, Artificial Sequence
  Description of Artificial Sequence: Synthetic oligonucleotide
  Target: ANGPTL4; (-) strand; PAM type: YTN; PAM sequence: TTT
tttgtatttttaattgagac

SEQ ID NO: 15174 - DNA, 20 bp, Artificial Sequence
  Description of Artificial Sequence: Synthetic oligonucleotide
  Target: ANGPTL4; (-) strand; PAM type: YTN; PAM sequence: CTA
gttttttgtatttttaattg

SEQ ID NO: 15175 - DNA, 20 bp, Artificial Sequence
  Description of Artificial Sequence: Synthetic oligonucleotide
  Target: ANGPTL4; (-) strand; PAM type: YTN; PAM sequence: CTC
ccaagtagatgggaacacag

SEQ ID NO: 15176 - DNA, 20 bp, Artificial Sequence
  Description of Artificial Sequence: Synthetic oligonucleotide
  Target: ANGPTL4; (-) strand; PAM type: YTN; PAM sequence: CTC
agcctcccaagtagatggga

SEQ ID NO: 15177 - DNA, 20 bp, Artificial Sequence
  Description of Artificial Sequence: Synthetic oligonucleotide
  Target: ANGPTL4; (-) strand; PAM type: YTN; PAM sequence: CTC
ccaactcagcctcccaagta

SEQ ID NO: 15178 - DNA, 20 bp, Artificial Sequence
  Description of Artificial Sequence: Synthetic oligonucleotide
  Target: ANGPTL4; (-) strand; PAM type: YTN; PAM sequence: CTC
aagagatcctcccaactcag

SEQ ID NO: 15179 - DNA, 20 bp, Artificial Sequence
  Description of Artificial Sequence: Synthetic oligonucleotide
  Target: ANGPTL4; (-) strand; PAM type: YTN; PAM sequence: CTA
ggctcaagagatcctcccaa

SEQ ID NO: 15180 - DNA, 20 bp, Artificial Sequence
  Description of Artificial Sequence: Synthetic oligonucleotide
  Target: ANGPTL4; (-) strand; PAM type: YTN; PAM sequence: CTC
ctaggctcaagagatcctcc

SEQ ID NO: 15181 - DNA, 20 bp, Artificial Sequence
  Description of Artificial Sequence: Synthetic oligonucleotide
  Target: ANGPTL4; (-) strand; PAM type: YTN; PAM sequence: TTA
tctcctaggctcaagagatc

SEQ ID NO: 15182 - DNA, 20 bp, Artificial Sequence
  Description of Artificial Sequence: Synthetic oligonucleotide
  Target: ANGPTL4; (-) strand; PAM type: YTN; PAM sequence: CTT
atctcctaggctcaagagat

SEQ ID NO: 15183 - DNA, 20 bp, Artificial Sequence
  Description of Artificial Sequence: Synthetic oligonucleotide
  Target: ANGPTL4; (-) strand; PAM type: YTN; PAM sequence: CTG
cagccttatctcctaggctc

SEQ ID NO: 15184 - DNA, 20 bp, Artificial Sequence
  Description of Artificial Sequence: Synthetic oligonucleotide
  Target: ANGPTL4; (-) strand; PAM type: YTN; PAM sequence: CTC
actgcagccttatctcctag

SEQ ID NO: 15185 - DNA, 20 bp, Artificial Sequence
  Description of Artificial Sequence: Synthetic oligonucleotide
  Target: ANGPTL4; (-) strand; PAM type: YTN; PAM sequence: CTC
agctcactgcagccttatct

SEQ ID NO: 15186 - DNA, 20 bp, Artificial Sequence
  Description of Artificial Sequence: Synthetic oligonucleotide
  Target: ANGPTL4; (-) strand; PAM type: YTN; PAM sequence: TTG
agtgcagtggcgcagtctca

SEQ ID NO: 15187 - DNA, 20 bp, Artificial Sequence
  Description of Artificial Sequence: Synthetic oligonucleotide
  Target: ANGPTL4; (-) strand; PAM type: YTN; PAM sequence: CTT
gagtgcagtggcgcagtctc

SEQ ID NO: 15188 - DNA, 20 bp, Artificial Sequence
  Description of Artificial Sequence: Synthetic oligonucleotide
  Target: ANGPTL4; (-) strand; PAM type: YTN; PAM sequence: CTG
tcacccaggcttgagtgcag

SEQ ID NO: 15189 - DNA, 20 bp, Artificial Sequence
  Description of Artificial Sequence: Synthetic oligonucleotide
  Target: ANGPTL4; (-) strand; PAM type: YTN; PAM sequence: CTC
tgtcacccaggcttgagtgc

SEQ ID NO: 15190 - DNA, 20 bp, Artificial Sequence
  Description of Artificial Sequence: Synthetic oligonucleotide
  Target: ANGPTL4; (-) strand; PAM type: YTN; PAM sequence: CTC
actctgtcacccaggcttga

SEQ ID NO: 15191 - DNA, 20 bp, Artificial Sequence
  Description of Artificial Sequence: Synthetic oligonucleotide
  Target: ANGPTL4; (-) strand; PAM type: YTN; PAM sequence: TTG
aggcaggggtctcactctgt

SEQ ID NO: 15192 - DNA, 20 bp, Artificial Sequence
  Description of Artificial Sequence: Synthetic oligonucleotide
  Target: ANGPTL4; (-) strand; PAM type: YTN; PAM sequence: TTT
gaggcaggggtctcactctg

SEQ ID NO: 15193 - DNA, 20 bp, Artificial Sequence
  Description of Artificial Sequence: Synthetic oligonucleotide
  Target: ANGPTL4; (-) strand; PAM type: YTN; PAM sequence: TTT
tgaggcaggggtctcactct

SEQ ID NO: 15194 - DNA, 20 bp, Artificial Sequence
  Description of Artificial Sequence: Synthetic oligonucleotide
  Target: ANGPTL4; (-) strand; PAM type: YTN; PAM sequence: CTT
ttgaggcaggggtctcactc

SEQ ID NO: 15195 - DNA, 20 bp, Artificial Sequence
  Description of Artificial Sequence: Synthetic oligonucleotide
  Target: ANGPTL4; (-) strand; PAM type: YTN; PAM sequence: TTC
ttttgaggcaggggtctcac

SEQ ID NO: 15196 - DNA, 20 bp, Artificial Sequence
  Description of Artificial Sequence: Synthetic oligonucleotide
  Target: ANGPTL4; (-) strand; PAM type: YTN; PAM sequence: TTT
cttttgaggcaggggtctca

SEQ ID NO: 15197 - DNA, 20 bp, Artificial Sequence
  Description of Artificial Sequence: Synthetic oligonucleotide
  Target: ANGPTL4; (-) strand; PAM type: YTN; PAM sequence: TTT
tcttttgaggcaggggtctc

SEQ ID NO: 15198 - DNA, 20 bp, Artificial Sequence
  Description of Artificial Sequence: Synthetic oligonucleotide
  Target: ANGPTL4; (-) strand; PAM type: YTN; PAM sequence: TTT
ttcttttgaggcaggggtct

SEQ ID NO: 15199 - DNA, 20 bp, Artificial Sequence
  Description of Artificial Sequence: Synthetic oligonucleotide
  Target: ANGPTL4; (-) strand; PAM type: YTN; PAM sequence: CTT
tttcttttgaggcaggggtc

SEQ ID NO: 15200 - DNA, 20 bp, Artificial Sequence
  Description of Artificial Sequence: Synthetic oligonucleotide
  Target: ANGPTL4; (-) strand; PAM type: YTN; PAM sequence: TTC
tttttcttttgaggcagggg

SEQ ID NO: 15201 - DNA, 20 bp, Artificial Sequence
  Description of Artificial Sequence: Synthetic oligonucleotide
  Target: ANGPTL4; (-) strand; PAM type: YTN; PAM sequence: TTT
ctttttcttttgaggcaggg

SEQ ID NO: 15202 - DNA, 20 bp, Artificial Sequence
  Description of Artificial Sequence: Synthetic oligonucleotide
  Target: ANGPTL4; (-) strand; PAM type: YTN; PAM sequence: TTT
tctttttcttttgaggcagg

SEQ ID NO: 15203 - DNA, 20 bp, Artificial Sequence
  Description of Artificial Sequence: Synthetic oligonucleotide
  Target: ANGPTL4; (-) strand; PAM type: YTN; PAM sequence: TTT
ttctttttcttttgaggcag

SEQ ID NO: 15204 - DNA, 20 bp, Artificial Sequence
  Description of Artificial Sequence: Synthetic oligonucleotide
  Target: ANGPTL4; (-) strand; PAM type: YTN; PAM sequence: TTT
tttctttttcttttgaggca

SEQ ID NO: 15205 - DNA, 20 bp, Artificial Sequence
  Description of Artificial Sequence: Synthetic oligonucleotide
  Target: ANGPTL4; (-) strand; PAM type: YTN; PAM sequence: CTG
cattttttctttttcttttg

SEQ ID NO: 15206 - DNA, 20 bp, Artificial Sequence
  Description of Artificial Sequence: Synthetic oligonucleotide
  Target: ANGPTL4; (-) strand; PAM type: YTN; PAM sequence: CTG
ggaccacaggtgtgagccac

SEQ ID NO: 15207 - DNA, 20 bp, Artificial Sequence
  Description of Artificial Sequence: Synthetic oligonucleotide
  Target: ANGPTL4; (-) strand; PAM type: YTN; PAM sequence: CTC
ccaagtagctgggaccacag

SEQ ID NO: 15208 - DNA, 20 bp, Artificial Sequence
  Description of Artificial Sequence: Synthetic oligonucleotide
  Target: ANGPTL4; (-) strand; PAM type: YTN; PAM sequence: CTG
ggcctcccaagtagctggga

SEQ ID NO: 15209 - DNA, 20 bp, Artificial Sequence
  Description of Artificial Sequence: Synthetic oligonucleotide
  Target: ANGPTL4; (-) strand; PAM type: YTN; PAM sequence: TTG
tacctgggcctcccaagtag

SEQ ID NO: 15210 - DNA, 20 bp, Artificial Sequence
  Description of Artificial Sequence: Synthetic oligonucleotide
  Target: ANGPTL4; (-) strand; PAM type: YTN; PAM sequence: CTT
gtacctgggcctcccaagta

SEQ ID NO: 15211 - DNA, 20 bp, Artificial Sequence
  Description of Artificial Sequence: Synthetic oligonucleotide
  Target: ANGPTL4; (-) strand; PAM type: YTN; PAM sequence: TTC
ttgtacctgggcctcccaag

SEQ ID NO: 15212 - DNA, 20 bp, Artificial Sequence
  Description of Artificial Sequence: Synthetic oligonucleotide
  Target: ANGPTL4; (-) strand; PAM type: YTN; PAM sequence: CTC
aagtgattcttgtacctggg

SEQ ID NO: 15213 - DNA, 20 bp, Artificial Sequence
  Description of Artificial Sequence: Synthetic oligonucleotide
  Target: ANGPTL4; (-) strand; PAM type: YTN; PAM sequence: TTA
cgggctcaagtgattcttgt

SEQ ID NO: 15214 - DNA, 20 bp, Artificial Sequence
  Description of Artificial Sequence: Synthetic oligonucleotide
  Target: ANGPTL4; (-) strand; PAM type: YTN; PAM sequence: CTT
acgggctcaagtgattcttg

SEQ ID NO: 15215 - DNA, 20 bp, Artificial Sequence
  Description of Artificial Sequence: Synthetic oligonucleotide
  Target: ANGPTL4; (-) strand; PAM type: YTN; PAM sequence: CTC
aatgcagcgtcaaccttacg

SEQ ID NO: 15216 - DNA, 20 bp, Artificial Sequence
  Description of Artificial Sequence: Synthetic oligonucleotide
  Target: ANGPTL4; (-) strand; PAM type: YTN; PAM sequence: CTG
gagtgcagtggtgtggtgat

SEQ ID NO: 15217 - DNA, 20 bp, Artificial Sequence
  Description of Artificial Sequence: Synthetic oligonucleotide
  Target: ANGPTL4; (-) strand; PAM type: YTN; PAM sequence: TTG
cccaggctggagtgcagtgg

SEQ ID NO: 15218 - DNA, 20 bp, Artificial Sequence
  Description of Artificial Sequence: Synthetic oligonucleotide
  Target: ANGPTL4; (-) strand; PAM type: YTN; PAM sequence: CTC
cattgcccaggctggagtgc

SEQ ID NO: 15219 - DNA, 20 bp, Artificial Sequence
  Description of Artificial Sequence: Synthetic oligonucleotide
  Target: ANGPTL4; (-) strand; PAM type: YTN; PAM sequence: CTG
gctccattgcccaggctgga

SEQ ID NO: 15220 - DNA, 20 bp, Artificial Sequence
  Description of Artificial Sequence: Synthetic oligonucleotide
  Target: ANGPTL4; (-) strand; PAM type: YTN; PAM sequence: TTG
agacagggcctggctccatt

SEQ ID NO: 15221 - DNA, 20 bp, Artificial Sequence
  Description of Artificial Sequence: Synthetic oligonucleotide
  Target: ANGPTL4; (-) strand; PAM type: YTN; PAM sequence: TTT
gagacagggcctggctccat

SEQ ID NO: 15222 - DNA, 20 bp, Artificial Sequence
  Description of Artificial Sequence: Synthetic oligonucleotide
  Target: ANGPTL4; (-) strand; PAM type: YTN; PAM sequence: TTT
tgagacagggcctggctcca

SEQ ID NO: 15223 - DNA, 20 bp, Artificial Sequence
  Description of Artificial Sequence: Synthetic oligonucleotide
  Target: ANGPTL4; (-) strand; PAM type: YTN; PAM sequence: TTT
ttgagacagggcctggctcc

SEQ ID NO: 15224 - DNA, 20 bp, Artificial Sequence
  Description of Artificial Sequence: Synthetic oligonucleotide
  Target: ANGPTL4; (-) strand; PAM type: YTN; PAM sequence: TTT
tttgagacagggcctggctc

SEQ ID NO: 15225 - DNA, 20 bp, Artificial Sequence
  Description of Artificial Sequence: Synthetic oligonucleotide
  Target: ANGPTL4; (-) strand; PAM type: YTN; PAM sequence: TTT
ttttgagacagggcctggct

SEQ ID NO: 15226 - DNA, 20 bp, Artificial Sequence
  Description of Artificial Sequence: Synthetic oligonucleotide
  Target: ANGPTL4; (-) strand; PAM type: YTN; PAM sequence: TTT
tttttgagacagggcctggc

SEQ ID NO: 15227 - DNA, 20 bp, Artificial Sequence
  Description of Artificial Sequence: Synthetic oligonucleotide
  Target: ANGPTL4; (-) strand; PAM type: YTN; PAM sequence: TTA
aaaacaattttttttgagac

SEQ ID NO: 15228 - DNA, 20 bp, Artificial Sequence
  Description of Artificial Sequence: Synthetic oligonucleotide
  Target: ANGPTL4; (-) strand; PAM type: YTN; PAM sequence: TTT
aaaaacaattttttttgaga

SEQ ID NO: 15229 - DNA, 20 bp, Artificial Sequence
  Description of Artificial Sequence: Synthetic oligonucleotide
  Target: ANGPTL4; (-) strand; PAM type: YTN; PAM sequence: TTA
agtttaaaaacaattttttt

SEQ ID NO: 15230 - DNA, 20 bp, Artificial Sequence
  Description of Artificial Sequence: Synthetic oligonucleotide
  Target: ANGPTL4; (-) strand; PAM type: YTN; PAM sequence: TTT
aagtttaaaaacaatttttt

SEQ ID NO: 15231 - DNA, 20 bp, Artificial Sequence
  Description of Artificial Sequence: Synthetic oligonucleotide
  Target: ANGPTL4; (-) strand; PAM type: YTN; PAM sequence: TTT
taagtttaaaaacaattttt

SEQ ID NO: 15232 - DNA, 20 bp, Artificial Sequence
  Description of Artificial Sequence: Synthetic oligonucleotide
  Target: ANGPTL4; (-) strand; PAM type: YTN; PAM sequence: TTT
ttaagtttaaaaacaatttt

SEQ ID NO: 15233 - DNA, 20 bp, Artificial Sequence
  Description of Artificial Sequence: Synthetic oligonucleotide
  Target: ANGPTL4; (-) strand; PAM type: YTN; PAM sequence: TTA
tttttaagtttaaaaacaat

SEQ ID NO: 15234 - DNA, 20 bp, Artificial Sequence
  Description of Artificial Sequence: Synthetic oligonucleotide
  Target: ANGPTL4; (-) strand; PAM type: YTN; PAM sequence: CTT
atttttaagtttaaaaacaa

SEQ ID NO: 15235 - DNA, 20 bp, Artificial Sequence
  Description of Artificial Sequence: Synthetic oligonucleotide
  Target: ANGPTL4; (-) strand; PAM type: YTN; PAM sequence: TTA
caggtgtgagcccccacacc

SEQ ID NO: 15236 - DNA, 20 bp, Artificial Sequence
  Description of Artificial Sequence: Synthetic oligonucleotide
  Target: ANGPTL4; (-) strand; PAM type: YTN; PAM sequence: CTG
ggattacaggtgtgagcccc

SEQ ID NO: 15237 - DNA, 20 bp, Artificial Sequence
  Description of Artificial Sequence: Synthetic oligonucleotide
  Target: ANGPTL4; (-) strand; PAM type: YTN; PAM sequence: CTC
ccaaagtgctgggattacag

SEQ ID NO: 15238 - DNA, 20 bp, Artificial Sequence
  Description of Artificial Sequence: Synthetic oligonucleotide
  Target: ANGPTL4; (-) strand; PAM type: YTN; PAM sequence: CTC
ggcctcccaaagtgctggga

SEQ ID NO: 15239 - DNA, 20 bp, Artificial Sequence
  Description of Artificial Sequence: Synthetic oligonucleotide
  Target: ANGPTL4; (-) strand; PAM type: YTN; PAM sequence: CTC
aggtgatccacccacctcgg

SEQ ID NO: 15240 - DNA, 20 bp, Artificial Sequence
  Description of Artificial Sequence: Synthetic oligonucleotide
  Target: ANGPTL4; (-) strand; PAM type: YTN; PAM sequence: CTG
acctcaggtgatccacccac

SEQ ID NO: 15241 - DNA, 20 bp, Artificial Sequence
  Description of Artificial Sequence: Synthetic oligonucleotide
  Target: ANGPTL4; (-) strand; PAM type: YTN; PAM sequence: CTC
ctgacctcaggtgatccacc

SEQ ID NO: 15242 - DNA, 20 bp, Artificial Sequence
  Description of Artificial Sequence: Synthetic oligonucleotide
  Target: ANGPTL4; (-) strand; PAM type: YTN; PAM sequence: TTG
aactcctgacctcaggtgat

SEQ ID NO: 15243 - DNA, 20 bp, Artificial Sequence
  Description of Artificial Sequence: Synthetic oligonucleotide
  Target: ANGPTL4; (-) strand; PAM type: YTN; PAM sequence: TTT
gaactcctgacctcaggtga

SEQ ID NO: 15244 - DNA, 20 bp, Artificial Sequence
  Description of Artificial Sequence: Synthetic oligonucleotide
  Target: ANGPTL4; (-) strand; PAM type: YTN; PAM sequence: TTT
tgaactcctgacctcaggtg

SEQ ID NO: 15245 - DNA, 20 bp, Artificial Sequence
  Description of Artificial Sequence: Synthetic oligonucleotide
  Target: ANGPTL4; (-) strand; PAM type: YTN; PAM sequence: CTA
gttttgaactcctgacctca

SEQ ID NO: 15246 - DNA, 20 bp, Artificial Sequence
  Description of Artificial Sequence: Synthetic oligonucleotide
  Target: ANGPTL4; (-) strand; PAM type: YTN; PAM sequence: TTG
gccaggctagttttgaactc

SEQ ID NO: 15247 - DNA, 20 bp, Artificial Sequence
  Description of Artificial Sequence: Synthetic oligonucleotide
  Target: ANGPTL4; (-) strand; PAM type: YTN; PAM sequence: TTC
accatgttggccaggctagt

SEQ ID NO: 15248 - DNA, 20 bp, Artificial Sequence
  Description of Artificial Sequence: Synthetic oligonucleotide
  Target: ANGPTL4; (-) strand; PAM type: YTN; PAM sequence: TTT
caccatgttggccaggctag

SEQ ID NO: 15249 - DNA, 20 bp, Artificial Sequence
  Description of Artificial Sequence: Synthetic oligonucleotide
  Target: ANGPTL4; (-) strand; PAM type: YTN; PAM sequence: TTA
gtagagacagggtttcacca

SEQ ID NO: 15250 - DNA, 20 bp, Artificial Sequence
  Description of Artificial Sequence: Synthetic oligonucleotide
  Target: ANGPTL4; (-) strand; PAM type: YTN; PAM sequence: TTT
agtagagacagggtttcacc

SEQ ID NO: 15251 - DNA, 20 bp, Artificial Sequence
  Description of Artificial Sequence: Synthetic oligonucleotide
  Target: ANGPTL4; (-) strand; PAM type: YTN; PAM sequence: TTT
tagtagagacagggtttcac

SEQ ID NO: 15252 - DNA, 20 bp, Artificial Sequence
  Description of Artificial Sequence: Synthetic oligonucleotide
  Target: ANGPTL4; (-) strand; PAM type: YTN; PAM sequence: TTT
ttagtagagacagggtttca

SEQ ID NO: 15253 - DNA, 20 bp, Artificial Sequence
  Description of Artificial Sequence: Synthetic oligonucleotide
  Target: ANGPTL4; (-) strand; PAM type: YTN; PAM sequence: TTG
tatttttagtagagacaggg

SEQ ID NO: 15254 - DNA, 20 bp, Artificial Sequence
  Description of Artificial Sequence: Synthetic oligonucleotide
  Target: ANGPTL4; (-) strand; PAM type: YTN; PAM sequence: TTT
gtatttttagtagagacagg

SEQ ID NO: 15255 - DNA, 20 bp, Artificial Sequence
  Description of Artificial Sequence: Synthetic oligonucleotide
  Target: ANGPTL4; (-) strand; PAM type: YTN; PAM sequence: TTT
tgtatttttagtagagacag

SEQ ID NO: 15256 - DNA, 20 bp, Artificial Sequence
  Description of Artificial Sequence: Synthetic oligonucleotide
  Target: ANGPTL4; (-) strand; PAM type: YTN; PAM sequence: TTT
ttgtatttttagtagagaca

SEQ ID NO: 15257 - DNA, 20 bp, Artificial Sequence
  Description of Artificial Sequence: Synthetic oligonucleotide
  Target: ANGPTL4; (-) strand; PAM type: YTN; PAM sequence: CTA
atttttgtatttttagtaga

SEQ ID NO: 15258 - DNA, 20 bp, Artificial Sequence
  Description of Artificial Sequence: Synthetic oligonucleotide
  Target: ANGPTL4; (-) strand; PAM type: YTN; PAM sequence: CTG
gcctaatttttgtattttta

SEQ ID NO: 15259 - DNA, 20 bp, Artificial Sequence
  Description of Artificial Sequence: Synthetic oligonucleotide
  Target: ANGPTL4; (-) strand; PAM type: YTN; PAM sequence: CTG
cgcctggcctaatttttgta

SEQ ID NO: 15260 - DNA, 20 bp, Artificial Sequence
  Description of Artificial Sequence: Synthetic oligonucleotide
  Target: ANGPTL4; (-) strand; PAM type: YTN; PAM sequence: TTA
caggtatgacccactgcgcc

SEQ ID NO: 15261 - DNA, 20 bp, Artificial Sequence
  Description of Artificial Sequence: Synthetic oligonucleotide
  Target: ANGPTL4; (-) strand; PAM type: YTN; PAM sequence: CTG
ggattacaggtatgacccac

SEQ ID NO: 15262 - DNA, 20 bp, Artificial Sequence
  Description of Artificial Sequence: Synthetic oligonucleotide
  Target: ANGPTL4; (-) strand; PAM type: YTN; PAM sequence: CTC
ccaaagtgctgggattacag

SEQ ID NO: 15263 - DNA, 20 bp, Artificial Sequence
  Description of Artificial Sequence: Synthetic oligonucleotide
  Target: ANGPTL4; (-) strand; PAM type: YTN; PAM sequence: CTC
agcctcccaaagtgctggga

SEQ ID NO: 15264 - DNA, 20 bp, Artificial Sequence
  Description of Artificial Sequence: Synthetic oligonucleotide
  Target: ANGPTL4; (-) strand; PAM type: YTN; PAM sequence: CTC
ctcagcctcccaaagtgctg

SEQ ID NO: 15265 - DNA, 20 bp, Artificial Sequence
  Description of Artificial Sequence: Synthetic oligonucleotide
  Target: ANGPTL4; (-) strand; PAM type: YTN; PAM sequence: CTC
atgtgatccaccctcctcag

SEQ ID NO: 15266 - DNA, 20 bp, Artificial Sequence
  Description of Artificial Sequence: Synthetic oligonucleotide
  Target: ANGPTL4; (-) strand; PAM type: YTN; PAM sequence: TTA
cctcatgtgatccaccctcc

SEQ ID NO: 15267 - DNA, 20 bp, Artificial Sequence
  Description of Artificial Sequence: Synthetic oligonucleotide
  Target: ANGPTL4; (-) strand; PAM type: YTN; PAM sequence: CTT
acctcatgtgatccaccctc

SEQ ID NO: 15268 - DNA, 20 bp, Artificial Sequence
  Description of Artificial Sequence: Synthetic oligonucleotide
  Target: ANGPTL4; (-) strand; PAM type: YTN; PAM sequence: CTC
cttacctcatgtgatccacc

SEQ ID NO: 15269 - DNA, 20 bp, Artificial Sequence
  Description of Artificial Sequence: Synthetic oligonucleotide
  Target: ANGPTL4; (-) strand; PAM type: YTN; PAM sequence: CTC
aaactccttacctcatgtga

SEQ ID NO: 15270 - DNA, 20 bp, Artificial Sequence
  Description of Artificial Sequence: Synthetic oligonucleotide
  Target: ANGPTL4; (-) strand; PAM type: YTN; PAM sequence: TTG
gtctcaaactccttacctca

SEQ ID NO: 15271 - DNA, 20 bp, Artificial Sequence
  Description of Artificial Sequence: Synthetic oligonucleotide
  Target: ANGPTL4; (-) strand; PAM type: YTN; PAM sequence: TTG
gccaggttggtctcaaactc

SEQ ID NO: 15272 - DNA, 20 bp, Artificial Sequence
  Description of Artificial Sequence: Synthetic oligonucleotide
  Target: ANGPTL4; (-) strand; PAM type: YTN; PAM sequence: TTC
accatgttggccaggttggt

SEQ ID NO: 15273 - DNA, 20 bp, Artificial Sequence
  Description of Artificial Sequence: Synthetic oligonucleotide
  Target: ANGPTL4; (-) strand; PAM type: YTN; PAM sequence: TTT
caccatgttggccaggttgg

SEQ ID NO: 15274 - DNA, 20 bp, Artificial Sequence
  Description of Artificial Sequence: Synthetic oligonucleotide
  Target: ANGPTL4; (-) strand; PAM type: YTN; PAM sequence: TTA
gtagtgagggggtttcacca

SEQ ID NO: 15275 - DNA, 20 bp, Artificial Sequence
  Description of Artificial Sequence: Synthetic oligonucleotide
  Target: ANGPTL4; (-) strand; PAM type: YTN; PAM sequence: TTT
agtagtgagggggtttcacc

SEQ ID NO: 15276 - DNA, 20 bp, Artificial Sequence
  Description of Artificial Sequence: Synthetic oligonucleotide
  Target: ANGPTL4; (-) strand; PAM type: YTN; PAM sequence: TTT
tagtagtgagggggtttcac

SEQ ID NO: 15277 - DNA, 20 bp, Artificial Sequence
  Description of Artificial Sequence: Synthetic oligonucleotide
  Target: ANGPTL4; (-) strand; PAM type: YTN; PAM sequence: TTT
ttagtagtgagggggtttca

SEQ ID NO: 15278 - DNA, 20 bp, Artificial Sequence
  Description of Artificial Sequence: Synthetic oligonucleotide
  Target: ANGPTL4; (-) strand; PAM type: YTN; PAM sequence: TTG
tatttttagtagtgaggggg

SEQ ID NO: 15279 - DNA, 20 bp, Artificial Sequence
  Description of Artificial Sequence: Synthetic oligonucleotide
  Target: ANGPTL4; (-) strand; PAM type: YTN; PAM sequence: TTT
gtatttttagtagtgagggg

SEQ ID NO: 15280 - DNA, 20 bp, Artificial Sequence
  Description of Artificial Sequence: Synthetic oligonucleotide
  Target: ANGPTL4; (-) strand; PAM type: YTN; PAM sequence: TTT
tgtatttttagtagtgaggg

SEQ ID NO: 15281 - DNA, 20 bp, Artificial Sequence
  Description of Artificial Sequence: Synthetic oligonucleotide
  Target: ANGPTL4; (-) strand; PAM type: YTN; PAM sequence: TTT
ttgtatttttagtagtgagg

SEQ ID NO: 15282 - DNA, 20 bp, Artificial Sequence
  Description of Artificial Sequence: Synthetic oligonucleotide
  Target: ANGPTL4; (-) strand; PAM type: YTN; PAM sequence: CTA
gtttttgtatttttagtagt

SEQ ID NO: 15283 - DNA, 20 bp, Artificial Sequence
  Description of Artificial Sequence: Synthetic oligonucleotide
  Target: ANGPTL4; (-) strand; PAM type: YTN; PAM sequence: CTG
gctagtttttgtatttttag

SEQ ID NO: 15284 - DNA, 20 bp, Artificial Sequence
  Description of Artificial Sequence: Synthetic oligonucleotide
  Target: ANGPTL4; (-) strand; PAM type: YTN; PAM sequence: TTA
caggcacccgccaccacgcc

SEQ ID NO: 15285 - DNA, 20 bp, Artificial Sequence
  Description of Artificial Sequence: Synthetic oligonucleotide
  Target: ANGPTL4; (-) strand; PAM type: YTN; PAM sequence: CTG
agtagccgggattacaggca

SEQ ID NO: 15286 - DNA, 20 bp, Artificial Sequence
  Description of Artificial Sequence: Synthetic oligonucleotide
  Target: ANGPTL4; (-) strand; PAM type: YTN; PAM sequence: CTC
ctgagtagccgggattacag

SEQ ID NO: 15287 - DNA, 20 bp, Artificial Sequence
  Description of Artificial Sequence: Synthetic oligonucleotide
  Target: ANGPTL4; (-) strand; PAM type: YTN; PAM sequence: CTC
agcctcctgagtagccggga

SEQ ID NO: 15288 - DNA, 20 bp, Artificial Sequence
  Description of Artificial Sequence: Synthetic oligonucleotide
  Target: ANGPTL4; (-) strand; PAM type: YTN; PAM sequence: CTC
atgcctcagcctcctgagta

SEQ ID NO: 15289 - DNA, 20 bp, Artificial Sequence
  Description of Artificial Sequence: Synthetic oligonucleotide
  Target: ANGPTL4; (-) strand; PAM type: YTN; PAM sequence: TTC
tcatgcctcagcctcctgag

SEQ ID NO: 15290 - DNA, 20 bp, Artificial Sequence
  Description of Artificial Sequence: Synthetic oligonucleotide
  Target: ANGPTL4; (-) strand; PAM type: YTN; PAM sequence: TTC
aagggattctcatgcctcag

SEQ ID NO: 15291 - DNA, 20 bp, Artificial Sequence
  Description of Artificial Sequence: Synthetic oligonucleotide
  Target: ANGPTL4; (-) strand; PAM type: YTN; PAM sequence: CTC
ccaggttcaagggattctca

SEQ ID NO: 15292 - DNA, 20 bp, Artificial Sequence
  Description of Artificial Sequence: Synthetic oligonucleotide
  Target: ANGPTL4; (-) strand; PAM type: YTN; PAM sequence: CTG
cctcccaggttcaagggatt

SEQ ID NO: 15293 - DNA, 20 bp, Artificial Sequence
  Description of Artificial Sequence: Synthetic oligonucleotide
  Target: ANGPTL4; (-) strand; PAM type: YTN; PAM sequence: CTC
tgcctcccaggttcaaggga

SEQ ID NO: 15294 - DNA, 20 bp, Artificial Sequence
  Description of Artificial Sequence: Synthetic oligonucleotide
  Target: ANGPTL4; (-) strand; PAM type: YTN; PAM sequence: CTG
cacctctgcctcccaggttc

SEQ ID NO: 15295 - DNA, 20 bp, Artificial Sequence
  Description of Artificial Sequence: Synthetic oligonucleotide
  Target: ANGPTL4; (-) strand; PAM type: YTN; PAM sequence: CTC
actgcacctctgcctcccag

SEQ ID NO: 15296 - DNA, 20 bp, Artificial Sequence
  Description of Artificial Sequence: Synthetic oligonucleotide
  Target: ANGPTL4; (-) strand; PAM type: YTN; PAM sequence: CTC
ggctcactgcacctctgcct

SEQ ID NO: 15297 - DNA, 20 bp, Artificial Sequence
  Description of Artificial Sequence: Synthetic oligonucleotide
  Target: ANGPTL4; (-) strand; PAM type: YTN; PAM sequence: CTG
gagtgcagtggcacaatctc

SEQ ID NO: 15298 - DNA, 20 bp, Artificial Sequence
  Description of Artificial Sequence: Synthetic oligonucleotide
  Target: ANGPTL4; (-) strand; PAM type: YTN; PAM sequence: CTC
ccaggctggagtgcagtggc

SEQ ID NO: 15299 - DNA, 20 bp, Artificial Sequence
  Description of Artificial Sequence: Synthetic oligonucleotide
  Target: ANGPTL4; (-) strand; PAM type: YTN; PAM sequence: CTA
tctcccaggctggagtgcag

SEQ ID NO: 15300 - DNA, 20 bp, Artificial Sequence
  Description of Artificial Sequence: Synthetic oligonucleotide
  Target: ANGPTL4; (-) strand; PAM type: YTN; PAM sequence: CTC
tatctcccaggctggagtgc

SEQ ID NO: 15301 - DNA, 20 bp, Artificial Sequence
  Description of Artificial Sequence: Synthetic oligonucleotide
  Target: ANGPTL4; (-) strand; PAM type: YTN; PAM sequence: CTC
actctatctcccaggctgga

SEQ ID NO: 15302 - DNA, 20 bp, Artificial Sequence
  Description of Artificial Sequence: Synthetic oligonucleotide
  Target: ANGPTL4; (-) strand; PAM type: YTN; PAM sequence: CTG
agtctcactctatctcccag

SEQ ID NO: 15303 - DNA, 20 bp, Artificial Sequence
  Description of Artificial Sequence: Synthetic oligonucleotide
  Target: ANGPTL4; (-) strand; PAM type: YTN; PAM sequence: TTG
agactgagtctcactctatc

SEQ ID NO: 15304 - DNA, 20 bp, Artificial Sequence
  Description of Artificial Sequence: Synthetic oligonucleotide
  Target: ANGPTL4; (-) strand; PAM type: YTN; PAM sequence: TTT
gagactgagtctcactctat

SEQ ID NO: 15305 - DNA, 20 bp, Artificial Sequence
  Description of Artificial Sequence: Synthetic oligonucleotide
  Target: ANGPTL4; (-) strand; PAM type: YTN; PAM sequence: TTT
tgagactgagtctcactcta

SEQ ID NO: 15306 - DNA, 20 bp, Artificial Sequence
  Description of Artificial Sequence: Synthetic oligonucleotide
  Target: ANGPTL4; (-) strand; PAM type: YTN; PAM sequence: TTT
ttgagactgagtctcactct

SEQ ID NO: 15307 - DNA, 20 bp, Artificial Sequence
  Description of Artificial Sequence: Synthetic oligonucleotide
  Target: ANGPTL4; (-) strand; PAM type: YTN; PAM sequence: TTT
tttgagactgagtctcactc

SEQ ID NO: 15308 - DNA, 20 bp, Artificial Sequence
  Description of Artificial Sequence: Synthetic oligonucleotide
  Target: ANGPTL4; (-) strand; PAM type: YTN; PAM sequence: TTT
ttttgagactgagtctcact

SEQ ID NO: 15309 - DNA, 20 bp, Artificial Sequence
  Description of Artificial Sequence: Synthetic oligonucleotide
  Target: ANGPTL4; (-) strand; PAM type: YTN; PAM sequence: TTT
tttttgagactgagtctcac

SEQ ID NO: 15310 - DNA, 20 bp, Artificial Sequence
  Description of Artificial Sequence: Synthetic oligonucleotide
  Target: ANGPTL4; (-) strand; PAM type: YTN; PAM sequence: TTT
ttttttgagactgagtctca

SEQ ID NO: 15311 - DNA, 20 bp, Artificial Sequence
  Description of Artificial Sequence: Synthetic oligonucleotide
  Target: ANGPTL4; (-) strand; PAM type: YTN; PAM sequence: CTT
tttttttgagactgagtctc

SEQ ID NO: 15312 - DNA, 20 bp, Artificial Sequence
  Description of Artificial Sequence: Synthetic oligonucleotide
  Target: ANGPTL4; (-) strand; PAM type: YTN; PAM sequence: TTG
gtctttttttttgagactga

SEQ ID NO: 15313 - DNA, 20 bp, Artificial Sequence
  Description of Artificial Sequence: Synthetic oligonucleotide
  Target: ANGPTL4; (-) strand; PAM type: YTN; PAM sequence: TTT
ggtctttttttttgagactg

SEQ ID NO: 15314 - DNA, 20 bp, Artificial Sequence
  Description of Artificial Sequence: Synthetic oligonucleotide
  Target: ANGPTL4; (-) strand; PAM type: YTN; PAM sequence: TTT
tggtctttttttttgagact

SEQ ID NO: 15315 - DNA, 20 bp, Artificial Sequence
  Description of Artificial Sequence: Synthetic oligonucleotide
  Target: ANGPTL4; (-) strand; PAM type: YTN; PAM sequence: TTT
ttggtctttttttttgagac

SEQ ID NO: 15316 - DNA, 20 bp, Artificial Sequence
  Description of Artificial Sequence: Synthetic oligonucleotide
  Target: ANGPTL4; (-) strand; PAM type: YTN; PAM sequence: CTA
atttttggtctttttttttg

SEQ ID NO: 15317 - DNA, 20 bp, Artificial Sequence
  Description of Artificial Sequence: Synthetic oligonucleotide
  Target: ANGPTL4; (-) strand; PAM type: YTN; PAM sequence: CTG
gctaatttttggtctttttt

SEQ ID NO: 15318 - DNA, 20 bp, Artificial Sequence
  Description of Artificial Sequence: Synthetic oligonucleotide
  Target: ANGPTL4; (-) strand; PAM type: YTN; PAM sequence: CTG
ccaccacacctggctaattt

SEQ ID NO: 15319 - DNA, 20 bp, Artificial Sequence
  Description of Artificial Sequence: Synthetic oligonucleotide
  Target: ANGPTL4; (-) strand; PAM type: YTN; PAM sequence: TTA
caggcgcctgccaccacacc

SEQ ID NO: 15320 - DNA, 20 bp, Artificial Sequence
  Description of Artificial Sequence: Synthetic oligonucleotide
  Target: ANGPTL4; (-) strand; PAM type: YTN; PAM sequence: CTG
ggattacaggcgcctgccac

SEQ ID NO: 15321 - DNA, 20 bp, Artificial Sequence
  Description of Artificial Sequence: Synthetic oligonucleotide
  Target: ANGPTL4; (-) strand; PAM type: YTN; PAM sequence: CTC
ccgagtagctgggattacag

SEQ ID NO: 15322 - DNA, 20 bp, Artificial Sequence
  Description of Artificial Sequence: Synthetic oligonucleotide
  Target: ANGPTL4; (-) strand; PAM type: YTN; PAM sequence: CTC
agcctcccgagtagctggga

SEQ ID NO: 15323 - DNA, 20 bp, Artificial Sequence
  Description of Artificial Sequence: Synthetic oligonucleotide
  Target: ANGPTL4; (-) strand; PAM type: YTN; PAM sequence: CTC
cctcagcctcccgagtagct

SEQ ID NO: 15324 - DNA, 20 bp, Artificial Sequence
  Description of Artificial Sequence: Synthetic oligonucleotide
  Target: ANGPTL4; (-) strand; PAM type: YTN; PAM sequence: CTC
ctccctcagcctcccgagta

SEQ ID NO: 15325 - DNA, 20 bp, Artificial Sequence
  Description of Artificial Sequence: Synthetic oligonucleotide
  Target: ANGPTL4; (-) strand; PAM type: YTN; PAM sequence: TTC
tcctccctcagcctcccgag

SEQ ID NO: 15326 - DNA, 20 bp, Artificial Sequence
  Description of Artificial Sequence: Synthetic oligonucleotide
  Target: ANGPTL4; (-) strand; PAM type: YTN; PAM sequence: TTA
agtgattctcctccctcagc

SEQ ID NO: 15327 - DNA, 20 bp, Artificial Sequence
  Description of Artificial Sequence: Synthetic oligonucleotide
  Target: ANGPTL4; (-) strand; PAM type: YTN; PAM sequence: TTT
aagtgattctcctccctcag

SEQ ID NO: 15328 - DNA, 20 bp, Artificial Sequence
  Description of Artificial Sequence: Synthetic oligonucleotide
  Target: ANGPTL4; (-) strand; PAM type: YTN; PAM sequence: CTC
aggtttaagtgattctcctc

SEQ ID NO: 15329 - DNA, 20 bp, Artificial Sequence
  Description of Artificial Sequence: Synthetic oligonucleotide
  Target: ANGPTL4; (-) strand; PAM type: YTN; PAM sequence: CTC
tcaggtttaagtgattctcc

SEQ ID NO: 15330 - DNA, 20 bp, Artificial Sequence
  Description of Artificial Sequence: Synthetic oligonucleotide
  Target: ANGPTL4; (-) strand; PAM type: YTN; PAM sequence: CTC
cgtctctcaggtttaagtga

SEQ ID NO: 15331 - DNA, 20 bp, Artificial Sequence
  Description of Artificial Sequence: Synthetic oligonucleotide
  Target: ANGPTL4; (-) strand; PAM type: YTN; PAM sequence: CTG
caacctccgtctctcaggtt

SEQ ID NO: 15332 - DNA, 20 bp, Artificial Sequence
  Description of Artificial Sequence: Synthetic oligonucleotide
  Target: ANGPTL4; (-) strand; PAM type: YTN; PAM sequence: CTC
actgcaacctccgtctctca

SEQ ID NO: 15333 - DNA, 20 bp, Artificial Sequence
  Description of Artificial Sequence: Synthetic oligonucleotide
  Target: ANGPTL4; (-) strand; PAM type: YTN; PAM sequence: CTC
agctcactgcaacctccgtc

SEQ ID NO: 15334 - DNA, 20 bp, Artificial Sequence
  Description of Artificial Sequence: Synthetic oligonucleotide
  Target: ANGPTL4; (-) strand; PAM type: YTN; PAM sequence: CTG
gagtgcagtggtgcgatctc

SEQ ID NO: 15335 - DNA, 20 bp, Artificial Sequence
  Description of Artificial Sequence: Synthetic oligonucleotide
  Target: ANGPTL4; (-) strand; PAM type: YTN; PAM sequence: CTG
tcacccaggctggagtgcag

SEQ ID NO: 15336 - DNA, 20 bp, Artificial Sequence
  Description of Artificial Sequence: Synthetic oligonucleotide
  Target: ANGPTL4; (-) strand; PAM type: YTN; PAM sequence: CTC
tgtcacccaggctggagtgc

SEQ ID NO: 15337 - DNA, 20 bp, Artificial Sequence
  Description of Artificial Sequence: Synthetic oligonucleotide
  Target: ANGPTL4; (-) strand; PAM type: YTN; PAM sequence: TTA
ctctgtcacccaggctggag

SEQ ID NO: 15338 - DNA, 20 bp, Artificial Sequence
  Description of Artificial Sequence: Synthetic oligonucleotide
  Target: ANGPTL4; (-) strand; PAM type: YTN; PAM sequence: CTT
actctgtcacccaggctgga

SEQ ID NO: 15339 - DNA, 20 bp, Artificial Sequence
  Description of Artificial Sequence: Synthetic oligonucleotide
  Target: ANGPTL4; (-) strand; PAM type: YTN; PAM sequence: TTG
agtcttactctgtcacccag

SEQ ID NO: 15340 - DNA, 20 bp, Artificial Sequence
  Description of Artificial Sequence: Synthetic oligonucleotide
  Target: ANGPTL4; (-) strand; PAM type: YTN; PAM sequence: TTG
agattgagtcttactctgtc

SEQ ID NO: 15341 - DNA, 20 bp, Artificial Sequence
  Description of Artificial Sequence: Synthetic oligonucleotide
  Target: ANGPTL4; (-) strand; PAM type: YTN; PAM sequence: TTT
gagattgagtcttactctgt

SEQ ID NO: 15342 - DNA, 20 bp, Artificial Sequence
  Description of Artificial Sequence: Synthetic oligonucleotide
  Target: ANGPTL4; (-) strand; PAM type: YTN; PAM sequence: TTT
tgagattgagtcttactctg

SEQ ID NO: 15343 - DNA, 20 bp, Artificial Sequence
  Description of Artificial Sequence: Synthetic oligonucleotide
  Target: ANGPTL4; (-) strand; PAM type: YTN; PAM sequence: TTT
ttgagattgagtcttactct

SEQ ID NO: 15344 - DNA, 20 bp, Artificial Sequence
  Description of Artificial Sequence: Synthetic oligonucleotide
  Target: ANGPTL4; (-) strand; PAM type: YTN; PAM sequence: TTT
tttgagattgagtcttactc

SEQ ID NO: 15345 - DNA, 20 bp, Artificial Sequence
  Description of Artificial Sequence: Synthetic oligonucleotide
  Target: ANGPTL4; (-) strand; PAM type: YTN; PAM sequence: TTT
ttttgagattgagtcttact

SEQ ID NO: 15346 - DNA, 20 bp, Artificial Sequence
  Description of Artificial Sequence: Synthetic oligonucleotide
  Target: ANGPTL4; (-) strand; PAM type: YTN; PAM sequence: TTT
tttttgagattgagtcttac

SEQ ID NO: 15347 - DNA, 20 bp, Artificial Sequence
  Description of Artificial Sequence: Synthetic oligonucleotide
  Target: ANGPTL4; (-) strand; PAM type: YTN; PAM sequence: TTT
ttttttgagattgagtctta

SEQ ID NO: 15348 - DNA, 20 bp, Artificial Sequence
  Description of Artificial Sequence: Synthetic oligonucleotide
  Target: ANGPTL4; (-) strand; PAM type: YTN; PAM sequence: TTT
tttttttgagattgagtctt

SEQ ID NO: 15349 - DNA, 20 bp, Artificial Sequence
  Description of Artificial Sequence: Synthetic oligonucleotide
  Target: ANGPTL4; (-) strand; PAM type: YTN; PAM sequence: TTT
ttttttttgagattgagtct

SEQ ID NO: 15350 - DNA, 20 bp, Artificial Sequence
  Description of Artificial Sequence: Synthetic oligonucleotide
  Target: ANGPTL4; (-) strand; PAM type: YTN; PAM sequence: TTT
tttttttttgagattgagtc

SEQ ID NO: 15351 - DNA, 20 bp, Artificial Sequence
  Description of Artificial Sequence: Synthetic oligonucleotide
  Target: ANGPTL4; (-) strand; PAM type: YTN; PAM sequence: CTT
ttttttttttgagattgagt

SEQ ID NO: 15352 - DNA, 20 bp, Artificial Sequence
  Description of Artificial Sequence: Synthetic oligonucleotide
  Target: ANGPTL4; (-) strand; PAM type: YTN; PAM sequence: TTG
acttttttttttttgagatt

SEQ ID NO: 15353 - DNA, 20 bp, Artificial Sequence
  Description of Artificial Sequence: Synthetic oligonucleotide
  Target: ANGPTL4; (-) strand; PAM type: YTN; PAM sequence: CTT
gacttttttttttttgagat

SEQ ID NO: 15354 - DNA, 20 bp, Artificial Sequence
  Description of Artificial Sequence: Synthetic oligonucleotide
  Target: ANGPTL4; (-) strand; PAM type: YTN; PAM sequence: TTG
gacttgactttttttttttt

SEQ ID NO: 15355 - DNA, 20 bp, Artificial Sequence
  Description of Artificial Sequence: Synthetic oligonucleotide
  Target: ANGPTL4; (-) strand; PAM type: YTN; PAM sequence: TTT
ggacttgacttttttttttt

SEQ ID NO: 15356 - DNA, 20 bp, Artificial Sequence
  Description of Artificial Sequence: Synthetic oligonucleotide
  Target: ANGPTL4; (-) strand; PAM type: YTN; PAM sequence: CTT
tggacttgactttttttttt

SEQ ID NO: 15357 - DNA, 20 bp, Artificial Sequence
  Description of Artificial Sequence: Synthetic oligonucleotide
  Target: ANGPTL4; (-) strand; PAM type: YTN; PAM sequence: CTG
ggctttggacttgacttttt

SEQ ID NO: 15358 - DNA, 20 bp, Artificial Sequence
  Description of Artificial Sequence: Synthetic oligonucleotide
  Target: ANGPTL4; (-) strand; PAM type: YTN; PAM sequence: TTG
gggaccaggctgggctttgg

SEQ ID NO: 15359 - DNA, 20 bp, Artificial Sequence
  Description of Artificial Sequence: Synthetic oligonucleotide
  Target: ANGPTL4; (-) strand; PAM type: YTN; PAM sequence: TTG
aggatgaggcaggttgggga

SEQ ID NO: 15360 - DNA, 20 bp, Artificial Sequence
  Description of Artificial Sequence: Synthetic oligonucleotide
  Target: ANGPTL4; (-) strand; PAM type: YTN; PAM sequence: CTG
aaaggagatagggatagggt

SEQ ID NO: 15361 - DNA, 20 bp, Artificial Sequence
  Description of Artificial Sequence: Synthetic oligonucleotide
  Target: ANGPTL4; (-) strand; PAM type: YTN; PAM sequence: TTG
agccaccgatggggctgaaa

SEQ ID NO: 15362 - DNA, 20 bp, Artificial Sequence
  Description of Artificial Sequence: Synthetic oligonucleotide
  Target: ANGPTL4; (-) strand; PAM type: YTN; PAM sequence: TTT
gagccaccgatggggctgaa

SEQ ID NO: 15363 - DNA, 20 bp, Artificial Sequence
  Description of Artificial Sequence: Synthetic oligonucleotide
  Target: ANGPTL4; (-) strand; PAM type: YTN; PAM sequence: CTT
tgagccaccgatggggctga

SEQ ID NO: 15364 - DNA, 20 bp, Artificial Sequence
  Description of Artificial Sequence: Synthetic oligonucleotide
  Target: ANGPTL4; (-) strand; PAM type: YTN; PAM sequence: CTG
ccggggtcaggggagaggga

SEQ ID NO: 15365 - DNA, 20 bp, Artificial Sequence
  Description of Artificial Sequence: Synthetic oligonucleotide
  Target: ANGPTL4; (-) strand; PAM type: YTN; PAM sequence: CTC
ctgccggggtcaggggagag

SEQ ID NO: 15366 - DNA, 20 bp, Artificial Sequence
  Description of Artificial Sequence: Synthetic oligonucleotide
  Target: ANGPTL4; (-) strand; PAM type: YTN; PAM sequence: CTG
caggtgccaaaccaccagcc

SEQ ID NO: 15367 - DNA, 20 bp, Artificial Sequence
  Description of Artificial Sequence: Synthetic oligonucleotide
  Target: ANGPTL4; (-) strand; PAM type: YTN; PAM sequence: TTG
gaatggctgcaggtgccaaa

SEQ ID NO: 15368 - DNA, 20 bp, Artificial Sequence
  Description of Artificial Sequence: Synthetic oligonucleotide
  Target: ANGPTL4; (-) strand; PAM type: YTN; PAM sequence: TTG
aggttggaatggctgcaggt

SEQ ID NO: 15369 - DNA, 20 bp, Artificial Sequence
  Description of Artificial Sequence: Synthetic oligonucleotide
  Target: ANGPTL4; (-) strand; PAM type: YTN; PAM sequence: CTG
gccgttgaggttggaatggc

SEQ ID NO: 15370 - DNA, 20 bp, Artificial Sequence
  Description of Artificial Sequence: Synthetic oligonucleotide
  Target: ANGPTL4; (-) strand; PAM type: YTN; PAM sequence: CTG
tgggatggagcggaagtact

SEQ ID NO: 15371 - DNA, 20 bp, Artificial Sequence
  Description of Artificial Sequence: Synthetic oligonucleotide
  Target: ANGPTL4; (-) strand; PAM type: YTN; PAM sequence: CTG
ctgtgggatggagcggaagt

SEQ ID NO: 15372 - DNA, 20 bp, Artificial Sequence
  Description of Artificial Sequence: Synthetic oligonucleotide
  Target: ANGPTL4; (-) strand; PAM type: YTN; PAM sequence: CTG
ccgctgctgtgggatggagc

SEQ ID NO: 15373 - DNA, 20 bp, Artificial Sequence
  Description of Artificial Sequence: Synthetic oligonucleotide
  Target: ANGPTL4; (-) strand; PAM type: YTN; PAM sequence: TTC
tgccgctgctgtgggatgga

SEQ ID NO: 15374 - DNA, 20 bp, Artificial Sequence
  Description of Artificial Sequence: Synthetic oligonucleotide
  Target: ANGPTL4; (-) strand; PAM type: YTN; PAM sequence: CTT
ctgccgctgctgtgggatgg

SEQ ID NO: 15375 - DNA, 20 bp, Artificial Sequence
  Description of Artificial Sequence: Synthetic oligonucleotide
  Target: ANGPTL4; (-) strand; PAM type: YTN; PAM sequence: TTA
agcttctgccgctgctgtgg

SEQ ID NO: 15376 - DNA, 20 bp, Artificial Sequence
  Description of Artificial Sequence: Synthetic oligonucleotide
  Target: ANGPTL4; (-) strand; PAM type: YTN; PAM sequence: CTT
aagcttctgccgctgctgtg

SEQ ID NO: 15377 - DNA, 20 bp, Artificial Sequence
  Description of Artificial Sequence: Synthetic oligonucleotide
  Target: ANGPTL4; (-) strand; PAM type: YTN; PAM sequence: TTC
ttaagcttctgccgctgctg

SEQ ID NO: 15378 - DNA, 20 bp, Artificial Sequence
  Description of Artificial Sequence: Synthetic oligonucleotide
  Target: ANGPTL4; (-) strand; PAM type: YTN; PAM sequence: CTT
cttaagcttctgccgctgct

SEQ ID NO: 15379 - DNA, 20 bp, Artificial Sequence
  Description of Artificial Sequence: Synthetic oligonucleotide
  Target: ANGPTL4; (-) strand; PAM type: YTN; PAM sequence: TTC
ccttcttaagcttctgccgc

SEQ ID NO: 15380 - DNA, 20 bp, Artificial Sequence
  Description of Artificial Sequence: Synthetic oligonucleotide
  Target: ANGPTL4; (-) strand; PAM type: YTN; PAM sequence: TTC
cagaagattcccttcttaag

SEQ ID NO: 15381 - DNA, 20 bp, Artificial Sequence
  Description of Artificial Sequence: Synthetic oligonucleotide
  Target: ANGPTL4; (-) strand; PAM type: YTN; PAM sequence: CTT
ccagaagattcccttcttaa

SEQ ID NO: 15382 - DNA, 20 bp, Artificial Sequence
  Description of Artificial Sequence: Synthetic oligonucleotide
  Target: ANGPTL4; (-) strand; PAM type: YTN; PAM sequence: CTG
cagcgggtagtagcggcccc

SEQ ID NO: 15383 - DNA, 20 bp, Artificial Sequence
  Description of Artificial Sequence: Synthetic oligonucleotide
  Target: ANGPTL4; (-) strand; PAM type: YTN; PAM sequence: CTG
gatcaacatggtggtggcct

SEQ ID NO: 15384 - DNA, 20 bp, Artificial Sequence
  Description of Artificial Sequence: Synthetic oligonucleotide
  Target: ANGPTL4; (-) strand; PAM type: YTN; PAM sequence: CTG
ccatgggctggatcaacatg

SEQ ID NO: 15385 - DNA, 20 bp, Artificial Sequence
  Description of Artificial Sequence: Synthetic oligonucleotide
  Target: ANGPTL4; (-) strand; PAM type: YTN; PAM sequence: CTG
ctgccatgggctggatcaac

SEQ ID NO: 15386 - DNA, 20 bp, Artificial Sequence
  Description of Artificial Sequence: Synthetic oligonucleotide
  Target: ANGPTL4; (-) strand; PAM type: YTN; PAM sequence: CTC
tgctgccatgggctggatca

SEQ ID NO: 15387 - DNA, 20 bp, Artificial Sequence
  Description of Artificial Sequence: Synthetic oligonucleotide
  Target: ANGPTL4; (-) strand; PAM type: YTN; PAM sequence: CTG
cctctgctgccatgggctgg

SEQ ID NO: 15388 - DNA, 20 bp, Artificial Sequence
  Description of Artificial Sequence: Synthetic oligonucleotide
  Target: ANGPTL4; (-) strand; PAM type: YTN; PAM sequence: CTA
ggaggctgcctctgctgcca

SEQ ID NO: 15389 - DNA, 20 bp, Artificial Sequence
  Description of Artificial Sequence: Synthetic oligonucleotide
  Target: ANGPTL4; (-) strand; PAM type: YTN; PAM sequence: CTG
ggaccaggcccagccaggac

SEQ ID NO: 15390 - DNA, 20 bp, Artificial Sequence
  Description of Artificial Sequence: Synthetic oligonucleotide
  Target: ANGPTL4; (-) strand; PAM type: YTN; PAM sequence: TTC
gtgggcctgggaccaggccc

SEQ ID NO: 15391 - DNA, 20 bp, Artificial Sequence
  Description of Artificial Sequence: Synthetic oligonucleotide
  Target: ANGPTL4; (-) strand; PAM type: YTN; PAM sequence: TTT
cgtgggcctgggaccaggcc

SEQ ID NO: 15392 - DNA, 20 bp, Artificial Sequence
  Description of Artificial Sequence: Synthetic oligonucleotide
  Target: ANGPTL4; (-) strand; PAM type: YTN; PAM sequence: CTT
tcgtgggcctgggaccaggc

SEQ ID NO: 15393 - DNA, 20 bp, Artificial Sequence
  Description of Artificial Sequence: Synthetic oligonucleotide
  Target: ANGPTL4; (-) strand; PAM type: YTN; PAM sequence: CTC
gggcagagccaagagtcacc

SEQ ID NO: 15394 - DNA, 20 bp, Artificial Sequence
  Description of Artificial Sequence: Synthetic oligonucleotide
  Target: ANGPTL4; (-) strand; PAM type: YTN; PAM sequence: CTG
cccaggcagggaacggccac

SEQ ID NO: 15395 - DNA, 20 bp, Artificial Sequence
  Description of Artificial Sequence: Synthetic oligonucleotide
  Target: ANGPTL4; (-) strand; PAM type: YTN; PAM sequence: TTG
gagcccctgcccaggcaggg

SEQ ID NO: 15396 - DNA, 20 bp, Artificial Sequence
  Description of Artificial Sequence: Synthetic oligonucleotide
  Target: ANGPTL4; (-) strand; PAM type: YTN; PAM sequence: CTT
ggagcccctgcccaggcagg

SEQ ID NO: 15397 - DNA, 20 bp, Artificial Sequence
  Description of Artificial Sequence: Synthetic oligonucleotide
  Target: ANGPTL4; (-) strand; PAM type: YTN; PAM sequence: CTC
cttggagcccctgcccaggc

SEQ ID NO: 15398 - DNA, 20 bp, Artificial Sequence
  Description of Artificial Sequence: Synthetic oligonucleotide
  Target: ANGPTL4; (-) strand; PAM type: YTN; PAM sequence: TTC
cagatggcccctccttggag

SEQ ID NO: 15399 - DNA, 20 bp, Artificial Sequence
  Description of Artificial Sequence: Synthetic oligonucleotide
  Target: ANGPTL4; (-) strand; PAM type: YTN; PAM sequence: TTT
ccagatggcccctccttgga

SEQ ID NO: 15400 - DNA, 20 bp, Artificial Sequence
  Description of Artificial Sequence: Synthetic oligonucleotide
  Target: ANGPTL4; (-) strand; PAM type: YTN; PAM sequence: CTG
tccacaagtttccagatggc

SEQ ID NO: 15401 - DNA, 20 bp, Artificial Sequence
  Description of Artificial Sequence: Synthetic oligonucleotide
  Target: ANGPTL4; (-) strand; PAM type: YTN; PAM sequence: CTC
tgtccacaagtttccagatg

SEQ ID NO: 15402 - DNA, 20 bp, Artificial Sequence
  Description of Artificial Sequence: Synthetic oligonucleotide
  Target: ANGPTL4; (-) strand; PAM type: YTN; PAM sequence: TTC
tctgtccacaagtttccaga

SEQ ID NO: 15403 - DNA, 20 bp, Artificial Sequence
  Description of Artificial Sequence: Synthetic oligonucleotide
  Target: ANGPTL4; (-) strand; PAM type: YTN; PAM sequence: CTT
ctctgtccacaagtttccag

SEQ ID NO: 15404 - DNA, 20 bp, Artificial Sequence
  Description of Artificial Sequence: Synthetic oligonucleotide
  Target: ANGPTL4; (-) strand; PAM type: YTN; PAM sequence: TTC
ttctctgtccacaagtttcc

SEQ ID NO: 15405 - DNA, 20 bp, Artificial Sequence
  Description of Artificial Sequence: Synthetic oligonucleotide
  Target: ANGPTL4; (-) strand; PAM type: YTN; PAM sequence: CTT
cttctctgtccacaagtttc

SEQ ID NO: 15406 - DNA, 20 bp, Artificial Sequence
  Description of Artificial Sequence: Synthetic oligonucleotide
  Target: ANGPTL4; (-) strand; PAM type: YTN; PAM sequence: CTC
cagtcgtggtcttcttctct

SEQ ID NO: 15407 - DNA, 20 bp, Artificial Sequence
  Description of Artificial Sequence: Synthetic oligonucleotide
  Target: ANGPTL4; (-) strand; PAM type: YTN; PAM sequence: TTC
tccagtcgtggtcttcttct

SEQ ID NO: 15408 - DNA, 20 bp, Artificial Sequence
  Description of Artificial Sequence: Synthetic oligonucleotide
  Target: ANGPTL4; (-) strand; PAM type: YTN; PAM sequence: CTT
ctccagtcgtggtcttcttc

SEQ ID NO: 15409 - DNA, 20 bp, Artificial Sequence
  Description of Artificial Sequence: Synthetic oligonucleotide
  Target: ANGPTL4; (-) strand; PAM type: YTN; PAM sequence: CTC
agaaagggggcttctccagt

SEQ ID NO: 15410 - DNA, 20 bp, Artificial Sequence
  Description of Artificial Sequence: Synthetic oligonucleotide
  Target: ANGPTL4; (-) strand; PAM type: YTN; PAM sequence: CTG
cactcagaaagggggcttct

SEQ ID NO: 15411 - DNA, 20 bp, Artificial Sequence
  Description of Artificial Sequence: Synthetic oligonucleotide
  Target: ANGPTL4; (-) strand; PAM type: YTN; PAM sequence: CTC
aggaggcaacgcatgcagcc

SEQ ID NO: 15412 - DNA, 20 bp, Artificial Sequence
  Description of Artificial Sequence: Synthetic oligonucleotide
  Target: ANGPTL4; (-) strand; PAM type: YTN; PAM sequence: CTC
gatctcaggaggcaacgcat

SEQ ID NO: 15413 - DNA, 20 bp, Artificial Sequence
  Description of Artificial Sequence: Synthetic oligonucleotide
  Target: ANGPTL4; (-) strand; PAM type: YTN; PAM sequence: CTG
cagcctcgatctcaggaggc

SEQ ID NO: 15414 - DNA, 20 bp, Artificial Sequence
  Description of Artificial Sequence: Synthetic oligonucleotide
  Target: ANGPTL4; (-) strand; PAM type: YTN; PAM sequence: CTG
agcatatcctgcagcctcga

SEQ ID NO: 15415 - DNA, 20 bp, Artificial Sequence
  Description of Artificial Sequence: Synthetic oligonucleotide
  Target: ANGPTL4; (-) strand; PAM type: YTN; PAM sequence: CTA
gagtctgagcatatcctgca

SEQ ID NO: 15416 - DNA, 20 bp, Artificial Sequence
  Description of Artificial Sequence: Synthetic oligonucleotide
  Target: ANGPTL4; (-) strand; PAM type: YTN; PAM sequence: CTC
tagagtctgagcatatcctg

SEQ ID NO: 15417 - DNA, 20 bp, Artificial Sequence
  Description of Artificial Sequence: Synthetic oligonucleotide
  Target: ANGPTL4; (-) strand; PAM type: YTN; PAM sequence: TTG
gtccacgcctctagagtctg

SEQ ID NO: 15418 - DNA, 20 bp, Artificial Sequence
  Description of Artificial Sequence: Synthetic oligonucleotide
  Target: ANGPTL4; (-) strand; PAM type: YTN; PAM sequence: CTT
ggtccacgcctctagagtct

SEQ ID NO: 15419 - DNA, 20 bp, Artificial Sequence
  Description of Artificial Sequence: Synthetic oligonucleotide
  Target: ANGPTL4; (-) strand; PAM type: YTN; PAM sequence: CTC
catgccccttggtccacgcc

SEQ ID NO: 15420 - DNA, 20 bp, Artificial Sequence
  Description of Artificial Sequence: Synthetic oligonucleotide
  Target: ANGPTL4; (-) strand; PAM type: YTN; PAM sequence: CTG
gccagcaaggagtgaagctc

SEQ ID NO: 15421 - DNA, 20 bp, Artificial Sequence
  Description of Artificial Sequence: Synthetic oligonucleotide
  Target: ANGPTL4; (-) strand; PAM type: YTN; PAM sequence: CTC
cctggccagcaaggagtgaa

SEQ ID NO: 15422 - DNA, 20 bp, Artificial Sequence
  Description of Artificial Sequence: Synthetic oligonucleotide
  Target: ANGPTL4; (-) strand; PAM type: YTN; PAM sequence: CTG
agtccccaactccctggcca

SEQ ID NO: 15423 - DNA, 20 bp, Artificial Sequence
  Description of Artificial Sequence: Synthetic oligonucleotide
  Target: ANGPTL4; (-) strand; PAM type: YTN; PAM sequence: CTC
tgagtccccaactccctggc

SEQ ID NO: 15424 - DNA, 20 bp, Artificial Sequence
  Description of Artificial Sequence: Synthetic oligonucleotide
  Target: ANGPTL4; (-) strand; PAM type: YTN; PAM sequence: CTG
gccccaagtggtccctctga

SEQ ID NO: 15425 - DNA, 20 bp, Artificial Sequence
  Description of Artificial Sequence: Synthetic oligonucleotide
  Target: ANGPTL4; (-) strand; PAM type: YTN; PAM sequence: CTG
gctggccccaagtggtccct

SEQ ID NO: 15426 - DNA, 20 bp, Artificial Sequence
  Description of Artificial Sequence: Synthetic oligonucleotide
  Target: ANGPTL4; (-) strand; PAM type: YTN; PAM sequence: TTG
aggccagtctggctggcccc

SEQ ID NO: 15427 - DNA, 20 bp, Artificial Sequence
  Description of Artificial Sequence: Synthetic oligonucleotide
  Target: ANGPTL4; (-) strand; PAM type: YTN; PAM sequence: CTG
agtccgccattgaggccagt

SEQ ID NO: 15428 - DNA, 20 bp, Artificial Sequence
  Description of Artificial Sequence: Synthetic oligonucleotide
  Target: ANGPTL4; (-) strand; PAM type: YTN; PAM sequence: CTG
gtccccgtcagtcaatgtga

SEQ ID NO: 15429 - DNA, 20 bp, Artificial Sequence
  Description of Artificial Sequence: Synthetic oligonucleotide
  Target: ANGPTL4; (-) strand; PAM type: YTN; PAM sequence: CTC
gacccacacaagccctggtc

SEQ ID NO: 15430 - DNA, 20 bp, Artificial Sequence
  Description of Artificial Sequence: Synthetic oligonucleotide
  Target: ANGPTL4; (-) strand; PAM type: YTN; PAM sequence: CTC
tcgacccacacaagccctgg

SEQ ID NO: 15431 - DNA, 20 bp, Artificial Sequence
  Description of Artificial Sequence: Synthetic oligonucleotide
  Target: ANGPTL4; (-) strand; PAM type: YTN; PAM sequence: CTA
cacacaacagcaccagcacc

SEQ ID NO: 15432 - DNA, 20 bp, Artificial Sequence
  Description of Artificial Sequence: Synthetic oligonucleotide
  Target: ANGPTL4; (-) strand; PAM type: YTN; PAM sequence: TTG
tgtccccaggggacctacac

SEQ ID NO: 15433 - DNA, 20 bp, Artificial Sequence
  Description of Artificial Sequence: Synthetic oligonucleotide
  Target: ANGPTL4; (-) strand; PAM type: YTN; PAM sequence: CTT
gtgtccccaggggacctaca

SEQ ID NO: 15434 - DNA, 20 bp, Artificial Sequence
  Description of Artificial Sequence: Synthetic oligonucleotide
  Target: ANGPTL4; (-) strand; PAM type: YTN; PAM sequence: CTG
cttgtgtccccaggggacct

SEQ ID NO: 15435 - DNA, 20 bp, Artificial Sequence
  Description of Artificial Sequence: Synthetic oligonucleotide
  Target: ANGPTL4; (-) strand; PAM type: YTN; PAM sequence: TTG
gcgcctgcttgtgtccccag

SEQ ID NO: 15436 - DNA, 20 bp, Artificial Sequence
  Description of Artificial Sequence: Synthetic oligonucleotide
  Target: ANGPTL4; (-) strand; PAM type: YTN; PAM sequence: CTC
cgcccagataccattggcgc

SEQ ID NO: 15437 - DNA, 20 bp, Artificial Sequence
  Description of Artificial Sequence: Synthetic oligonucleotide
  Target: ANGPTL4; (-) strand; PAM type: YTN; PAM sequence: CTG
tgagctccgcccagatacca

SEQ ID NO: 15438 - DNA, 20 bp, Artificial Sequence
  Description of Artificial Sequence: Synthetic oligonucleotide
  Target: ANGPTL4; (-) strand; PAM type: YTN; PAM sequence: CTC
tgtgagctccgcccagatac

SEQ ID NO: 15439 - DNA, 20 bp, Artificial Sequence
  Description of Artificial Sequence: Synthetic oligonucleotide
  Target: ANGPTL4; (-) strand; PAM type: YTN; PAM sequence: TTC
caagaactctgtgagctccg

SEQ ID NO: 15440 - DNA, 20 bp, Artificial Sequence
  Description of Artificial Sequence: Synthetic oligonucleotide
  Target: ANGPTL4; (-) strand; PAM type: YTN; PAM sequence: TTA
ttccaagaactctgtgagct

SEQ ID NO: 15441 - DNA, 20 bp, Artificial Sequence
  Description of Artificial Sequence: Synthetic oligonucleotide
  Target: ANGPTL4; (-) strand; PAM type: YTN; PAM sequence: TTT
attccaagaactctgtgagc

SEQ ID NO: 15442 - DNA, 20 bp, Artificial Sequence
  Description of Artificial Sequence: Synthetic oligonucleotide
  Target: ANGPTL4; (-) strand; PAM type: YTN; PAM sequence: TTT
tattccaagaactctgtgag

SEQ ID NO: 15443 - DNA, 20 bp, Artificial Sequence
  Description of Artificial Sequence: Synthetic oligonucleotide
  Target: ANGPTL4; (-) strand; PAM type: YTN; PAM sequence: CTT
ttattccaagaactctgtga

SEQ ID NO: 15444 - DNA, 20 bp, Artificial Sequence
  Description of Artificial Sequence: Synthetic oligonucleotide
  Target: ANGPTL4; (-) strand; PAM type: YTN; PAM sequence: TTG
cttttattccaagaactctg

SEQ ID NO: 15445 - DNA, 20 bp, Artificial Sequence
  Description of Artificial Sequence: Synthetic oligonucleotide
  Target: ANGPTL4; (-) strand; PAM type: YTN; PAM sequence: CTG
aggttgcttttattccaaga

SEQ ID NO: 15446 - DNA, 20 bp, Artificial Sequence
  Description of Artificial Sequence: Synthetic oligonucleotide
  Target: ANGPTL4; (-) strand; PAM type: YTN; PAM sequence: TTC
tgaggttgcttttattccaa

SEQ ID NO: 15447 - DNA, 20 bp, Artificial Sequence
  Description of Artificial Sequence: Synthetic oligonucleotide
  Target: ANGPTL4; (-) strand; PAM type: YTN; PAM sequence: CTA
aagaaagagaaaaaaaagaa

SEQ ID NO: 15448 - DNA, 20 bp, Artificial Sequence
  Description of Artificial Sequence: Synthetic oligonucleotide
  Target: ANGPTL4; (-) strand; PAM type: YTN; PAM sequence: CTG
tgaactaaagaaagagaaaa

SEQ ID NO: 15449 - DNA, 20 bp, Artificial Sequence
  Description of Artificial Sequence: Synthetic oligonucleotide
  Target: ANGPTL4; (-) strand; PAM type: YTN; PAM sequence: CTA
gatctgtgaactaaagaaag

SEQ ID NO: 15450 - DNA, 20 bp, Artificial Sequence
  Description of Artificial Sequence: Synthetic oligonucleotide
  Target: ANGPTL4; (-) strand; PAM type: YTN; PAM sequence: TTA
ctagatctgtgaactaaaga

SEQ ID NO: 15451 - DNA, 20 bp, Artificial Sequence
  Description of Artificial Sequence: Synthetic oligonucleotide
  Target: ANGPTL4; (-) strand; PAM type: YTN; PAM sequence: CTT
actagatctgtgaactaaag

SEQ ID NO: 15452 - DNA, 20 bp, Artificial Sequence
  Description of Artificial Sequence: Synthetic oligonucleotide
  Target: ANGPTL4; (-) strand; PAM type: YTN; PAM sequence: CTG
agggtaacttactagatctg

SEQ ID NO: 15453 - DNA, 20 bp, Artificial Sequence
  Description of Artificial Sequence: Synthetic oligonucleotide
  Target: ANGPTL4; (-) strand; PAM type: YTN; PAM sequence: TTA
aaacaaactgagggtaactt

SEQ ID NO: 15454 - DNA, 20 bp, Artificial Sequence
  Description of Artificial Sequence: Synthetic oligonucleotide
  Target: ANGPTL4; (-) strand; PAM type: YTN; PAM sequence: TTT
aaaacaaactgagggtaact

SEQ ID NO: 15455 - DNA, 20 bp, Artificial Sequence
  Description of Artificial Sequence: Synthetic oligonucleotide
  Target: ANGPTL4; (-) strand; PAM type: YTN; PAM sequence: TTT
taaaacaaactgagggtaac

SEQ ID NO: 15456 - DNA, 20 bp, Artificial Sequence
  Description of Artificial Sequence: Synthetic oligonucleotide
  Target: ANGPTL4; (-) strand; PAM type: YTN; PAM sequence: TTT
ttaaaacaaactgagggtaa

SEQ ID NO: 15457 - DNA, 20 bp, Artificial Sequence
  Description of Artificial Sequence: Synthetic oligonucleotide
  Target: ANGPTL4; (-) strand; PAM type: YTN; PAM sequence: CTT
tttaaaacaaactgagggta

SEQ ID NO: 15458 - DNA, 20 bp, Artificial Sequence
  Description of Artificial Sequence: Synthetic oligonucleotide
  Target: ANGPTL4; (-) strand; PAM type: YTN; PAM sequence: TTC
actttttaaaacaaactgag

SEQ ID NO: 15459 - DNA, 20 bp, Artificial Sequence
  Description of Artificial Sequence: Synthetic oligonucleotide
  Target: ANGPTL4; (-) strand; PAM type: YTN; PAM sequence: TTG
ttcactttttaaaacaaact

SEQ ID NO: 15460 - DNA, 20 bp, Artificial Sequence
  Description of Artificial Sequence: Synthetic oligonucleotide
  Target: ANGPTL4; (-) strand; PAM type: YTN; PAM sequence: TTT
gttcactttttaaaacaaac

SEQ ID NO: 15461 - DNA, 20 bp, Artificial Sequence
  Description of Artificial Sequence: Synthetic oligonucleotide
  Target: ANGPTL4; (-) strand; PAM type: YTN; PAM sequence: CTT
tgttcactttttaaaacaaa

SEQ ID NO: 15462 - DNA, 20 bp, Artificial Sequence
  Description of Artificial Sequence: Synthetic oligonucleotide
  Target: ANGPTL4; (-) strand; PAM type: YTN; PAM sequence: TTA
catggactttgttcactttt

SEQ ID NO: 15463 - DNA, 20 bp, Artificial Sequence
  Description of Artificial Sequence: Synthetic oligonucleotide
  Target: ANGPTL4; (-) strand; PAM type: YTN; PAM sequence: TTT
acatggactttgttcacttt

SEQ ID NO: 15464 - DNA, 20 bp, Artificial Sequence
  Description of Artificial Sequence: Synthetic oligonucleotide
  Target: ANGPTL4; (-) strand; PAM type: YTN; PAM sequence: CTG
ggaacatgtttacatggact

SEQ ID NO: 15465 - DNA, 20 bp, Artificial Sequence
  Description of Artificial Sequence: Synthetic oligonucleotide
  Target: ANGPTL4; (-) strand; PAM type: YTN; PAM sequence: CTG
gccctgggaacatgtttaca

SEQ ID NO: 15466 - DNA, 20 bp, Artificial Sequence
  Description of Artificial Sequence: Synthetic oligonucleotide
  Target: ANGPTL4; (-) strand; PAM type: YTN; PAM sequence: TTA
caggcacgagacaccgtgcc

SEQ ID NO: 15467 - DNA, 20 bp, Artificial Sequence
  Description of Artificial Sequence: Synthetic oligonucleotide
  Target: ANGPTL4; (-) strand; PAM type: YTN; PAM sequence: CTG
ggattacaggcacgagacac

SEQ ID NO: 15468 - DNA, 20 bp, Artificial Sequence
  Description of Artificial Sequence: Synthetic oligonucleotide
  Target: ANGPTL4; (-) strand; PAM type: YTN; PAM sequence: CTC
acaaatggctgggattacag

SEQ ID NO: 15469 - DNA, 20 bp, Artificial Sequence
  Description of Artificial Sequence: Synthetic oligonucleotide
  Target: ANGPTL4; (-) strand; PAM type: YTN; PAM sequence: CTC
ggcctcacaaatggctggga

SEQ ID NO: 15470 - DNA, 20 bp, Artificial Sequence
  Description of Artificial Sequence: Synthetic oligonucleotide
  Target: ANGPTL4; (-) strand; PAM type: YTN; PAM sequence: CTG
tctcggcctcacaaatggct

SEQ ID NO: 15471 - DNA, 20 bp, Artificial Sequence
  Description of Artificial Sequence: Synthetic oligonucleotide
  Target: ANGPTL4; (-) strand; PAM type: YTN; PAM sequence: CTG
cctgtctcggcctcacaaat

SEQ ID NO: 15472 - DNA, 20 bp, Artificial Sequence
  Description of Artificial Sequence: Synthetic oligonucleotide
  Target: ANGPTL4; (-) strand; PAM type: YTN; PAM sequence: CTC
aagtgacctgcctgtctcgg

SEQ ID NO: 15473 - DNA, 20 bp, Artificial Sequence
  Description of Artificial Sequence: Synthetic oligonucleotide
  Target: ANGPTL4; (-) strand; PAM type: YTN; PAM sequence: CTG
acctcaagtgacctgcctgt

SEQ ID NO: 15474 - DNA, 20 bp, Artificial Sequence
  Description of Artificial Sequence: Synthetic oligonucleotide
  Target: ANGPTL4; (-) strand; PAM type: YTN; PAM sequence: CTG
ctgacctcaagtgacctgcc

SEQ ID NO: 15475 - DNA, 20 bp, Artificial Sequence
  Description of Artificial Sequence: Synthetic oligonucleotide
  Target: ANGPTL4; (-) strand; PAM type: YTN; PAM sequence: CTC
gaactgctgacctcaagtga

SEQ ID NO: 15476 - DNA, 20 bp, Artificial Sequence
  Description of Artificial Sequence: Synthetic oligonucleotide
  Target: ANGPTL4; (-) strand; PAM type: YTN; PAM sequence: CTG
gtctcgaactgctgacctca

SEQ ID NO: 15477 - DNA, 20 bp, Artificial Sequence
  Description of Artificial Sequence: Synthetic oligonucleotide
  Target: ANGPTL4; (-) strand; PAM type: YTN; PAM sequence: TTG
gcccggctggtctcgaactg

SEQ ID NO: 15478 - DNA, 20 bp, Artificial Sequence
  Description of Artificial Sequence: Synthetic oligonucleotide
  Target: ANGPTL4; (-) strand; PAM type: YTN; PAM sequence: TTC
caccatgttggcccggctgg

SEQ ID NO: 15479 - DNA, 20 bp, Artificial Sequence
  Description of Artificial Sequence: Synthetic oligonucleotide
  Target: ANGPTL4; (-) strand; PAM type: YTN; PAM sequence: TTG
tagagatgggggttccacca

SEQ ID NO: 15480 - DNA, 20 bp, Artificial Sequence
  Description of Artificial Sequence: Synthetic oligonucleotide
  Target: ANGPTL4; (-) strand; PAM type: YTN; PAM sequence: TTT
gtagagatgggggttccacc

SEQ ID NO: 15481 - DNA, 20 bp, Artificial Sequence
  Description of Artificial Sequence: Synthetic oligonucleotide
  Target: ANGPTL4; (-) strand; PAM type: YTN; PAM sequence: TTT
tgtagagatgggggttccac

SEQ ID NO: 15482 - DNA, 20 bp, Artificial Sequence
  Description of Artificial Sequence: Synthetic oligonucleotide
  Target: ANGPTL4; (-) strand; PAM type: YTN; PAM sequence: TTT
ttgtagagatgggggttcca

SEQ ID NO: 15483 - DNA, 20 bp, Artificial Sequence
  Description of Artificial Sequence: Synthetic oligonucleotide
  Target: ANGPTL4; (-) strand; PAM type: YTN; PAM sequence: TTT
tttgtagagatgggggttcc

SEQ ID NO: 15484 - DNA, 20 bp, Artificial Sequence
  Description of Artificial Sequence: Synthetic oligonucleotide
  Target: ANGPTL4; (-) strand; PAM type: YTN; PAM sequence: TTT
ttttgtagagatgggggttc

SEQ ID NO: 15485 - DNA, 20 bp, Artificial Sequence
  Description of Artificial Sequence: Synthetic oligonucleotide
  Target: ANGPTL4; (-) strand; PAM type: YTN; PAM sequence: TTG
tatttttttgtagagatggg

SEQ ID NO: 15486 - DNA, 20 bp, Artificial Sequence
  Description of Artificial Sequence: Synthetic oligonucleotide
  Target: ANGPTL4; (-) strand; PAM type: YTN; PAM sequence: TTT
gtatttttttgtagagatgg

SEQ ID NO: 15487 - DNA, 20 bp, Artificial Sequence
  Description of Artificial Sequence: Synthetic oligonucleotide
  Target: ANGPTL4; (-) strand; PAM type: YTN; PAM sequence: TTT
tgtatttttttgtagagatg

SEQ ID NO: 15488 - DNA, 20 bp, Artificial Sequence
  Description of Artificial Sequence: Synthetic oligonucleotide
  Target: ANGPTL4; (-) strand; PAM type: YTN; PAM sequence: TTT
ttgtatttttttgtagagat

SEQ ID NO: 15489 - DNA, 20 bp, Artificial Sequence
  Description of Artificial Sequence: Synthetic oligonucleotide
  Target: ANGPTL4; (-) strand; PAM type: YTN; PAM sequence: CTA
atttttgtatttttttgtag

SEQ ID NO: 15490 - DNA, 20 bp, Artificial Sequence
  Description of Artificial Sequence: Synthetic oligonucleotide
  Target: ANGPTL4; (-) strand; PAM type: YTN; PAM sequence: CTC
ggctaatttttgtatttttt

SEQ ID NO: 15491 - DNA, 20 bp, Artificial Sequence
  Description of Artificial Sequence: Synthetic oligonucleotide
  Target: ANGPTL4; (-) strand; PAM type: YTN; PAM sequence: CTA
cagacgtgcaccaccatgct

SEQ ID NO: 15492 - DNA, 20 bp, Artificial Sequence
  Description of Artificial Sequence: Synthetic oligonucleotide
  Target: ANGPTL4; (-) strand; PAM type: YTN; PAM sequence: CTG
ggactacagacgtgcaccac

SEQ ID NO: 15493 - DNA, 20 bp, Artificial Sequence
  Description of Artificial Sequence: Synthetic oligonucleotide
  Target: ANGPTL4; (-) strand; PAM type: YTN; PAM sequence: CTA
gagtagctgggactacagac

SEQ ID NO: 15494 - DNA, 20 bp, Artificial Sequence
  Description of Artificial Sequence: Synthetic oligonucleotide
  Target: ANGPTL4; (-) strand; PAM type: YTN; PAM sequence: CTC
tagagtagctgggactacag

SEQ ID NO: 15495 - DNA, 20 bp, Artificial Sequence
  Description of Artificial Sequence: Synthetic oligonucleotide
  Target: ANGPTL4; (-) strand; PAM type: YTN; PAM sequence: CTG
cgtcagcctctagagtagct

SEQ ID NO: 15496 - DNA, 20 bp, Artificial Sequence
  Description of Artificial Sequence: Synthetic oligonucleotide
  Target: ANGPTL4; (-) strand; PAM type: YTN; PAM sequence: TTC
tgcgtcagcctctagagtag

SEQ ID NO: 15497 - DNA, 20 bp, Artificial Sequence
  Description of Artificial Sequence: Synthetic oligonucleotide
  Target: ANGPTL4; (-) strand; PAM type: YTN; PAM sequence: CTT
ctgcgtcagcctctagagta

SEQ ID NO: 15498 - DNA, 20 bp, Artificial Sequence
  Description of Artificial Sequence: Synthetic oligonucleotide
  Target: ANGPTL4; (-) strand; PAM type: YTN; PAM sequence: TTC
ttctgcgtcagcctctagag

SEQ ID NO: 15499 - DNA, 20 bp, Artificial Sequence
  Description of Artificial Sequence: Synthetic oligonucleotide
  Target: ANGPTL4; (-) strand; PAM type: YTN; PAM sequence: CTC
aagtgattcttctgcgtcag

SEQ ID NO: 15500 - DNA, 20 bp, Artificial Sequence
  Description of Artificial Sequence: Synthetic oligonucleotide
  Target: ANGPTL4; (-) strand; PAM type: YTN; PAM sequence: TTG
gctcaagtgattcttctgcg

SEQ ID NO: 15501 - DNA, 20 bp, Artificial Sequence
  Description of Artificial Sequence: Synthetic oligonucleotide
  Target: ANGPTL4; (-) strand; PAM type: YTN; PAM sequence: CTT
ggctcaagtgattcttctgc

SEQ ID NO: 15502 - DNA, 20 bp, Artificial Sequence
  Description of Artificial Sequence: Synthetic oligonucleotide
  Target: ANGPTL4; (-) strand; PAM type: YTN; PAM sequence: CTC
cttggctcaagtgattcttc

SEQ ID NO: 15503 - DNA, 20 bp, Artificial Sequence
  Description of Artificial Sequence: Synthetic oligonucleotide
  Target: ANGPTL4; (-) strand; PAM type: YTN; PAM sequence: CTG
cctccttggctcaagtgatt

SEQ ID NO: 15504 - DNA, 20 bp, Artificial Sequence
  Description of Artificial Sequence: Synthetic oligonucleotide
  Target: ANGPTL4; (-) strand; PAM type: YTN; PAM sequence: CTC
tgcctccttggctcaagtga

SEQ ID NO: 15505 - DNA, 20 bp, Artificial Sequence
  Description of Artificial Sequence: Synthetic oligonucleotide
  Target: ANGPTL4; (-) strand; PAM type: YTN; PAM sequence: TTG
cagcctctgcctccttggct

SEQ ID NO: 15506 - DNA, 20 bp, Artificial Sequence
  Description of Artificial Sequence: Synthetic oligonucleotide
  Target: ANGPTL4; (-) strand; PAM type: YTN; PAM sequence: TTT
gcagcctctgcctccttggc

SEQ ID NO: 15507 - DNA, 20 bp, Artificial Sequence
  Description of Artificial Sequence: Synthetic oligonucleotide
  Target: ANGPTL4; (-) strand; PAM type: YTN; PAM sequence: TTA
tttgcagcctctgcctcctt

SEQ ID NO: 15508 - DNA, 20 bp, Artificial Sequence
  Description of Artificial Sequence: Synthetic oligonucleotide
  Target: ANGPTL4; (-) strand; PAM type: YTN; PAM sequence: CTT
atttgcagcctctgcctcct

SEQ ID NO: 15509 - DNA, 20 bp, Artificial Sequence
  Description of Artificial Sequence: Synthetic oligonucleotide
  Target: ANGPTL4; (-) strand; PAM type: YTN; PAM sequence: CTC
ggcttatttgcagcctctgc

SEQ ID NO: 15510 - DNA, 20 bp, Artificial Sequence
  Description of Artificial Sequence: Synthetic oligonucleotide
  Target: ANGPTL4; (-) strand; PAM type: YTN; PAM sequence: CTG
gagtgcagtggcgcaatctc

SEQ ID NO: 15511 - DNA, 20 bp, Artificial Sequence
  Description of Artificial Sequence: Synthetic oligonucleotide
  Target: ANGPTL4; (-) strand; PAM type: YTN; PAM sequence: TTG
cccaggctggagtgcagtgg

SEQ ID NO: 15512 - DNA, 20 bp, Artificial Sequence
  Description of Artificial Sequence: Synthetic oligonucleotide
  Target: ANGPTL4; (-) strand; PAM type: YTN; PAM sequence: CTG
ttgcccaggctggagtgcag

SEQ ID NO: 15513 - DNA, 20 bp, Artificial Sequence
  Description of Artificial Sequence: Synthetic oligonucleotide
  Target: ANGPTL4; (-) strand; PAM type: YTN; PAM sequence: CTC
tgttgcccaggctggagtgc

SEQ ID NO: 15514 - DNA, 20 bp, Artificial Sequence
  Description of Artificial Sequence: Synthetic oligonucleotide
  Target: ANGPTL4; (-) strand; PAM type: YTN; PAM sequence: TTG
ctctgttgcccaggctggag

SEQ ID NO: 15515 - DNA, 20 bp, Artificial Sequence
  Description of Artificial Sequence: Synthetic oligonucleotide
  Target: ANGPTL4; (-) strand; PAM type: YTN; PAM sequence: CTT
gctctgttgcccaggctgga

SEQ ID NO: 15516 - DNA, 20 bp, Artificial Sequence
  Description of Artificial Sequence: Synthetic oligonucleotide
  Target: ANGPTL4; (-) strand; PAM type: YTN; PAM sequence: TTG
agatggagtcttgctctgtt

SEQ ID NO: 15517 - DNA, 20 bp, Artificial Sequence
  Description of Artificial Sequence: Synthetic oligonucleotide
  Target: ANGPTL4; (-) strand; PAM type: YTN; PAM sequence: TTT
gagatggagtcttgctctgt

SEQ ID NO: 15518 - DNA, 20 bp, Artificial Sequence
  Description of Artificial Sequence: Synthetic oligonucleotide
  Target: ANGPTL4; (-) strand; PAM type: YTN; PAM sequence: TTT
tgagatggagtcttgctctg

SEQ ID NO: 15519 - DNA, 20 bp, Artificial Sequence
  Description of Artificial Sequence: Synthetic oligonucleotide
  Target: ANGPTL4; (-) strand; PAM type: YTN; PAM sequence: TTG
ttttgagatggagtcttgct

SEQ ID NO: 15520 - DNA, 20 bp, Artificial Sequence
  Description of Artificial Sequence: Synthetic oligonucleotide
  Target: ANGPTL4; (-) strand; PAM type: YTN; PAM sequence: TTT
gttttgagatggagtcttgc

SEQ ID NO: 15521 - DNA, 20 bp, Artificial Sequence
  Description of Artificial Sequence: Synthetic oligonucleotide
  Target: ANGPTL4; (-) strand; PAM type: YTN; PAM sequence: TTT
tgttttgagatggagtcttg

SEQ ID NO: 15522 - DNA, 20 bp, Artificial Sequence
  Description of Artificial Sequence: Synthetic oligonucleotide
  Target: ANGPTL4; (-) strand; PAM type: YTN; PAM sequence: TTT
ttgttttgagatggagtctt

SEQ ID NO: 15523 - DNA, 20 bp, Artificial Sequence
  Description of Artificial Sequence: Synthetic oligonucleotide
  Target: ANGPTL4; (-) strand; PAM type: YTN; PAM sequence: TTA
tttttgttttgagatggagt

SEQ ID NO: 15524 - DNA, 20 bp, Artificial Sequence
  Description of Artificial Sequence: Synthetic oligonucleotide
  Target: ANGPTL4; (-) strand; PAM type: YTN; PAM sequence: CTA
cgaaaaaaaaattatttttg

SEQ ID NO: 15525 - DNA, 20 bp, Artificial Sequence
  Description of Artificial Sequence: Synthetic oligonucleotide
  Target: ANGPTL4; (-) strand; PAM type: YTN; PAM sequence: CTC
tacgaaaaaaaaattatttt

SEQ ID NO: 15526 - DNA, 20 bp, Artificial Sequence
  Description of Artificial Sequence: Synthetic oligonucleotide
  Target: ANGPTL4; (-) strand; PAM type: YTN; PAM sequence: CTG
cctctacgaaaaaaaaatta

SEQ ID NO: 15527 - DNA, 20 bp, Artificial Sequence
  Description of Artificial Sequence: Synthetic oligonucleotide
  Target: ANGPTL4; (-) strand; PAM type: YTN; PAM sequence: CTG
gacaatagaatgagaccctg

SEQ ID NO: 15528 - DNA, 20 bp, Artificial Sequence
  Description of Artificial Sequence: Synthetic oligonucleotide
  Target: ANGPTL4; (-) strand; PAM type: YTN; PAM sequence: TTG
agaccagcctggacaataga

SEQ ID NO: 15529 - DNA, 20 bp, Artificial Sequence
  Description of Artificial Sequence: Synthetic oligonucleotide
  Target: ANGPTL4; (-) strand; PAM type: YTN; PAM sequence: TTT
gagaccagcctggacaatag

SEQ ID NO: 15530 - DNA, 20 bp, Artificial Sequence
  Description of Artificial Sequence: Synthetic oligonucleotide
  Target: ANGPTL4; (-) strand; PAM type: YTN; PAM sequence: CTC
ggtgtttgagaccagcctgg

SEQ ID NO: 15531 - DNA, 20 bp, Artificial Sequence
  Description of Artificial Sequence: Synthetic oligonucleotide
  Target: ANGPTL4; (-) strand; PAM type: YTN; PAM sequence: TTG
agtctcggtgtttgagacca

SEQ ID NO: 15532 - DNA, 20 bp, Artificial Sequence
  Description of Artificial Sequence: Synthetic oligonucleotide
  Target: ANGPTL4; (-) strand; PAM type: YTN; PAM sequence: CTT
gagtctcggtgtttgagacc

SEQ ID NO: 15533 - DNA, 20 bp, Artificial Sequence
  Description of Artificial Sequence: Synthetic oligonucleotide
  Target: ANGPTL4; (-) strand; PAM type: YTN; PAM sequence: TTG
tgaagccaaggcaggaggat

SEQ ID NO: 15534 - DNA, 20 bp, Artificial Sequence
  Description of Artificial Sequence: Synthetic oligonucleotide
  Target: ANGPTL4; (-) strand; PAM type: YTN; PAM sequence: TTT
gtgaagccaaggcaggagga

SEQ ID NO: 15535 - DNA, 20 bp, Artificial Sequence
  Description of Artificial Sequence: Synthetic oligonucleotide
  Target: ANGPTL4; (-) strand; PAM type: YTN; PAM sequence: CTT
tgtgaagccaaggcaggagg

SEQ ID NO: 15536 - DNA, 20 bp, Artificial Sequence
  Description of Artificial Sequence: Synthetic oligonucleotide
  Target: ANGPTL4; (-) strand; PAM type: YTN; PAM sequence: TTA
atcccatcactttgtgaagc

SEQ ID NO: 15537 - DNA, 20 bp, Artificial Sequence
  Description of Artificial Sequence: Synthetic oligonucleotide
  Target: ANGPTL4; (-) strand; PAM type: YTN; PAM sequence: TTT
aatcccatcactttgtgaag

SEQ ID NO: 15538 - DNA, 20 bp, Artificial Sequence
  Description of Artificial Sequence: Synthetic oligonucleotide
  Target: ANGPTL4; (-) strand; PAM type: YTN; PAM sequence: CTT
taatcccatcactttgtgaa

SEQ ID NO: 15539 - DNA, 20 bp, Artificial Sequence
  Description of Artificial Sequence: Synthetic oligonucleotide
  Target: ANGPTL4; (-) strand; PAM type: YTN; PAM sequence: CTC
acacctttaatcccatcact

SEQ ID NO: 15540 - DNA, 20 bp, Artificial Sequence
  Description of Artificial Sequence: Synthetic oligonucleotide
  Target: ANGPTL4; (-) strand; PAM type: YTN; PAM sequence: TTC
aggggtgggtgcagtggcgc

SEQ ID NO: 15541 - DNA, 20 bp, Artificial Sequence
  Description of Artificial Sequence: Synthetic oligonucleotide
  Target: ANGPTL4; (-) strand; PAM type: YTN; PAM sequence: CTT
caggggtgggtgcagtggcg

SEQ ID NO: 15542 - DNA, 20 bp, Artificial Sequence
  Description of Artificial Sequence: Synthetic oligonucleotide
  Target: ANGPTL4; (-) strand; PAM type: YTN; PAM sequence: TTA
gagccttcaggggtgggtgc

SEQ ID NO: 15543 - DNA, 20 bp, Artificial Sequence
  Description of Artificial Sequence: Synthetic oligonucleotide
  Target: ANGPTL4; (-) strand; PAM type: YTN; PAM sequence: TTA
acaaaacacagatgtagaat

SEQ ID NO: 15544 - DNA, 20 bp, Artificial Sequence
  Description of Artificial Sequence: Synthetic oligonucleotide
  Target: ANGPTL4; (-) strand; PAM type: YTN; PAM sequence: TTT
aacaaaacacagatgtagaa

SEQ ID NO: 15545 - DNA, 20 bp, Artificial Sequence
  Description of Artificial Sequence: Synthetic oligonucleotide
  Target: ANGPTL4; (-) strand; PAM type: YTN; PAM sequence: TTT
taacaaaacacagatgtaga

SEQ ID NO: 15546 - DNA, 20 bp, Artificial Sequence
  Description of Artificial Sequence: Synthetic oligonucleotide
  Target: ANGPTL4; (-) strand; PAM type: YTN; PAM sequence: TTT
ttaacaaaacacagatgtag

SEQ ID NO: 15547 - DNA, 20 bp, Artificial Sequence
  Description of Artificial Sequence: Synthetic oligonucleotide
  Target: ANGPTL4; (-) strand; PAM type: YTN; PAM sequence: TTT
tttaacaaaacacagatgta

SEQ ID NO: 15548 - DNA, 20 bp, Artificial Sequence
  Description of Artificial Sequence: Synthetic oligonucleotide
  Target: ANGPTL4; (-) strand; PAM type: YTN; PAM sequence: TTT
ttttaacaaaacacagatgt

SEQ ID NO: 15549 - DNA, 20 bp, Artificial Sequence
  Description of Artificial Sequence: Synthetic oligonucleotide
  Target: ANGPTL4; (-) strand; PAM type: YTN; PAM sequence: TTT
tttttaacaaaacacagatg

SEQ ID NO: 15550 - DNA, 20 bp, Artificial Sequence
  Description of Artificial Sequence: Synthetic oligonucleotide
  Target: ANGPTL4; (-) strand; PAM type: YTN; PAM sequence: TTT
ttttttaacaaaacacagat

SEQ ID NO: 15551 - DNA, 20 bp, Artificial Sequence
  Description of Artificial Sequence: Synthetic oligonucleotide
  Target: ANGPTL4; (-) strand; PAM type: YTN; PAM sequence: TTT
tttttttaacaaaacacaga

SEQ ID NO: 15552 - DNA, 20 bp, Artificial Sequence
  Description of Artificial Sequence: Synthetic oligonucleotide
  Target: ANGPTL4; (-) strand; PAM type: YTN; PAM sequence: TTT
ttttttttaacaaaacacag

SEQ ID NO: 15553 - DNA, 20 bp, Artificial Sequence
  Description of Artificial Sequence: Synthetic oligonucleotide
  Target: ANGPTL4; (-) strand; PAM type: YTN; PAM sequence: TTT
tttttttttaacaaaacaca

SEQ ID NO: 15554 - DNA, 20 bp, Artificial Sequence
  Description of Artificial Sequence: Synthetic oligonucleotide
  Target: ANGPTL4; (-) strand; PAM type: YTN; PAM sequence: TTT
ttttttttttaacaaaacac

SEQ ID NO: 15555 - DNA, 20 bp, Artificial Sequence
  Description of Artificial Sequence: Synthetic oligonucleotide
  Target: ANGPTL4; (-) strand; PAM type: YTN; PAM sequence: TTT
tttttttttttaacaaaaca

SEQ ID NO: 15556 - DNA, 20 bp, Artificial Sequence
  Description of Artificial Sequence: Synthetic oligonucleotide
  Target: ANGPTL4; (-) strand; PAM type: YTN; PAM sequence: TTT
ttttttttttttaacaaaac

SEQ ID NO: 15557 - DNA, 20 bp, Artificial Sequence
  Description of Artificial Sequence: Synthetic oligonucleotide
  Target: ANGPTL4; (-) strand; PAM type: YTN; PAM sequence: TTT
tttttttttttttaacaaaa

SEQ ID NO: 15558 - DNA, 20 bp, Artificial Sequence
  Description of Artificial Sequence: Synthetic oligonucleotide
  Target: ANGPTL4; (-) strand; PAM type: YTN; PAM sequence: CTT
ttttttttttttttaacaaa

SEQ ID NO: 15559 - DNA, 20 bp, Artificial Sequence
  Description of Artificial Sequence: Synthetic oligonucleotide
  Target: ANGPTL4; (-) strand; PAM type: YTN; PAM sequence: TTA
caggcatgagcgaccacgcc

SEQ ID NO: 15560 - DNA, 20 bp, Artificial Sequence
  Description of Artificial Sequence: Synthetic oligonucleotide
  Target: ANGPTL4; (-) strand; PAM type: YTN; PAM sequence: CTG
ggattacaggcatgagcgac

SEQ ID NO: 15561 - DNA, 20 bp, Artificial Sequence
  Description of Artificial Sequence: Synthetic oligonucleotide
  Target: ANGPTL4; (-) strand; PAM type: YTN; PAM sequence: CTA
aagtgctgggattacaggca

SEQ ID NO: 15562 - DNA, 20 bp, Artificial Sequence
  Description of Artificial Sequence: Synthetic oligonucleotide
  Target: ANGPTL4; (-) strand; PAM type: YTN; PAM sequence: CTC
ctaaagtgctgggattacag

SEQ ID NO: 15563 - DNA, 20 bp, Artificial Sequence
  Description of Artificial Sequence: Synthetic oligonucleotide
  Target: ANGPTL4; (-) strand; PAM type: YTN; PAM sequence: CTC
ggcctcctaaagtgctggga

SEQ ID NO: 15564 - DNA, 20 bp, Artificial Sequence
  Description of Artificial Sequence: Synthetic oligonucleotide
  Target: ANGPTL4; (-) strand; PAM type: YTN; PAM sequence: CTG
cctcggcctcctaaagtgct

SEQ ID NO: 15565 - DNA, 20 bp, Artificial Sequence
  Description of Artificial Sequence: Synthetic oligonucleotide
  Target: ANGPTL4; (-) strand; PAM type: YTN; PAM sequence: CTC
gtaatgtcagatgatccacc

SEQ ID NO: 15566 - DNA, 20 bp, Artificial Sequence
  Description of Artificial Sequence: Synthetic oligonucleotide
  Target: ANGPTL4; (-) strand; PAM type: YTN; PAM sequence: CTG
gaactcgtaatgtcagatga

SEQ ID NO: 15567 - DNA, 20 bp, Artificial Sequence
  Description of Artificial Sequence: Synthetic oligonucleotide
  Target: ANGPTL4; (-) strand; PAM type: YTN; PAM sequence: TTG
gtcaggcgggcctggaactc

SEQ ID NO: 15568 - DNA, 20 bp, Artificial Sequence
  Description of Artificial Sequence: Synthetic oligonucleotide
  Target: ANGPTL4; (-) strand; PAM type: YTN; PAM sequence: TTC
accatgttggtcaggcgggc

SEQ ID NO: 15569 - DNA, 20 bp, Artificial Sequence
  Description of Artificial Sequence: Synthetic oligonucleotide
  Target: ANGPTL4; (-) strand; PAM type: YTN; PAM sequence: TTT
caccatgttggtcaggcggg

SEQ ID NO: 15570 - DNA, 20 bp, Artificial Sequence
  Description of Artificial Sequence: Synthetic oligonucleotide
  Target: ANGPTL4; (-) strand; PAM type: YTN; PAM sequence: TTA
gtagagacggggtttcacca

SEQ ID NO: 15571 - DNA, 20 bp, Artificial Sequence
  Description of Artificial Sequence: Synthetic oligonucleotide
  Target: ANGPTL4; (-) strand; PAM type: YTN; PAM sequence: TTT
agtagagacggggtttcacc

SEQ ID NO: 15572 - DNA, 20 bp, Artificial Sequence
  Description of Artificial Sequence: Synthetic oligonucleotide
  Target: ANGPTL4; (-) strand; PAM type: YTN; PAM sequence: TTT
tagtagagacggggtttcac

SEQ ID NO: 15573 - DNA, 20 bp, Artificial Sequence
  Description of Artificial Sequence: Synthetic oligonucleotide
  Target: ANGPTL4; (-) strand; PAM type: YTN; PAM sequence: TTT
ttagtagagacggggtttca

SEQ ID NO: 15574 - DNA, 20 bp, Artificial Sequence
  Description of Artificial Sequence: Synthetic oligonucleotide
  Target: ANGPTL4; (-) strand; PAM type: YTN; PAM sequence: TTG
tatttttagtagagacgggg

SEQ ID NO: 15575 - DNA, 20 bp, Artificial Sequence
  Description of Artificial Sequence: Synthetic oligonucleotide
  Target: ANGPTL4; (-) strand; PAM type: YTN; PAM sequence: TTT
gtatttttagtagagacggg

SEQ ID NO: 15576 - DNA, 20 bp, Artificial Sequence
  Description of Artificial Sequence: Synthetic oligonucleotide
  Target: ANGPTL4; (-) strand; PAM type: YTN; PAM sequence: TTT
tgtatttttagtagagacgg

SEQ ID NO: 15577 - DNA, 20 bp, Artificial Sequence
  Description of Artificial Sequence: Synthetic oligonucleotide
  Target: ANGPTL4; (-) strand; PAM type: YTN; PAM sequence: TTT
ttgtatttttagtagagacg

SEQ ID NO: 15578 - DNA, 20 bp, Artificial Sequence
  Description of Artificial Sequence: Synthetic oligonucleotide
  Target: ANGPTL4; (-) strand; PAM type: YTN; PAM sequence: CTA
atttttgtatttttagtaga

SEQ ID NO: 15579 - DNA, 20 bp, Artificial Sequence
  Description of Artificial Sequence: Synthetic oligonucleotide
  Target: ANGPTL4; (-) strand; PAM type: YTN; PAM sequence: TTA
caggcacccgccaccacacc

SEQ ID NO: 15580 - DNA, 20 bp, Artificial Sequence
  Description of Artificial Sequence: Synthetic oligonucleotide
  Target: ANGPTL4; (-) strand; PAM type: YTN; PAM sequence: CTG
ggattacaggcacccgccac

SEQ ID NO: 15581 - DNA, 20 bp, Artificial Sequence
  Description of Artificial Sequence: Synthetic oligonucleotide
  Target: ANGPTL4; (-) strand; PAM type: YTN; PAM sequence: CTG
agtagctgggattacaggca

SEQ ID NO: 15582 - DNA, 20 bp, Artificial Sequence
  Description of Artificial Sequence: Synthetic oligonucleotide
  Target: ANGPTL4; (-) strand; PAM type: YTN; PAM sequence: CTC
ctgagtagctgggattacag

SEQ ID NO: 15583 - DNA, 20 bp, Artificial Sequence
  Description of Artificial Sequence: Synthetic oligonucleotide
  Target: ANGPTL4; (-) strand; PAM type: YTN; PAM sequence: CTC
agcctcctgagtagctggga

SEQ ID NO: 15584 - DNA, 20 bp, Artificial Sequence
  Description of Artificial Sequence: Synthetic oligonucleotide
  Target: ANGPTL4; (-) strand; PAM type: YTN; PAM sequence: CTG
cctcagcctcctgagtagct

SEQ ID NO: 15585 - DNA, 20 bp, Artificial Sequence
  Description of Artificial Sequence: Synthetic oligonucleotide
  Target: ANGPTL4; (-) strand; PAM type: YTN; PAM sequence: CTC
ctgcctcagcctcctgagta

SEQ ID NO: 15586 - DNA, 20 bp, Artificial Sequence
  Description of Artificial Sequence: Synthetic oligonucleotide
  Target: ANGPTL4; (-) strand; PAM type: YTN; PAM sequence: TTC
tcctgcctcagcctcctgag

SEQ ID NO: 15587 - DNA, 20 bp, Artificial Sequence
  Description of Artificial Sequence: Synthetic oligonucleotide
  Target: ANGPTL4; (-) strand; PAM type: YTN; PAM sequence: TTC
aagtgattctcctgcctcag

SEQ ID NO: 15588 - DNA, 20 bp, Artificial Sequence
  Description of Artificial Sequence: Synthetic oligonucleotide
  Target: ANGPTL4; (-) strand; PAM type: YTN; PAM sequence: CTC
ccgagttcaagtgattctcc

SEQ ID NO: 15589 - DNA, 20 bp, Artificial Sequence
  Description of Artificial Sequence: Synthetic oligonucleotide
  Target: ANGPTL4; (-) strand; PAM type: YTN; PAM sequence: CTC
cacctcccgagttcaagtga

SEQ ID NO: 15590 - DNA, 20 bp, Artificial Sequence
  Description of Artificial Sequence: Synthetic oligonucleotide
  Target: ANGPTL4; (-) strand; PAM type: YTN; PAM sequence: CTC
accgcaacctccacctcccg

SEQ ID NO: 15591 - DNA, 20 bp, Artificial Sequence
  Description of Artificial Sequence: Synthetic oligonucleotide
  Target: ANGPTL4; (-) strand; PAM type: YTN; PAM sequence: CTG
ctcaccgcaacctccacctc

SEQ ID NO: 15592 - DNA, 20 bp, Artificial Sequence
  Description of Artificial Sequence: Synthetic oligonucleotide
  Target: ANGPTL4; (-) strand; PAM type: YTN; PAM sequence: CTC
tgctcaccgcaacctccacc

SEQ ID NO: 15593 - DNA, 20 bp, Artificial Sequence
  Description of Artificial Sequence: Synthetic oligonucleotide
  Target: ANGPTL4; (-) strand; PAM type: YTN; PAM sequence: CTG
gagtgcagtggcatgatctc

SEQ ID NO: 15594 - DNA, 20 bp, Artificial Sequence
  Description of Artificial Sequence: Synthetic oligonucleotide
  Target: ANGPTL4; (-) strand; PAM type: YTN; PAM sequence: CTG
tcacccaggctggagtgcag

SEQ ID NO: 15595 - DNA, 20 bp, Artificial Sequence
  Description of Artificial Sequence: Synthetic oligonucleotide
  Target: ANGPTL4; (-) strand; PAM type: YTN; PAM sequence: CTC
tgtcacccaggctggagtgc

SEQ ID NO: 15596 - DNA, 20 bp, Artificial Sequence
  Description of Artificial Sequence: Synthetic oligonucleotide
  Target: ANGPTL4; (-) strand; PAM type: YTN; PAM sequence: TTG
ctctgtcacccaggctggag

SEQ ID NO: 15597 - DNA, 20 bp, Artificial Sequence
  Description of Artificial Sequence: Synthetic oligonucleotide
  Target: ANGPTL4; (-) strand; PAM type: YTN; PAM sequence: CTT
gctctgtcacccaggctgga

SEQ ID NO: 15598 - DNA, 20 bp, Artificial Sequence
  Description of Artificial Sequence: Synthetic oligonucleotide
  Target: ANGPTL4; (-) strand; PAM type: YTN; PAM sequence: TTG
aaatcaagtcttgctctgtc

SEQ ID NO: 15599 - DNA, 20 bp, Artificial Sequence
  Description of Artificial Sequence: Synthetic oligonucleotide
  Target: ANGPTL4; (-) strand; PAM type: YTN; PAM sequence: TTT
gaaatcaagtcttgctctgt

SEQ ID NO: 15600 - DNA, 20 bp, Artificial Sequence
  Description of Artificial Sequence: Synthetic oligonucleotide
  Target: ANGPTL4; (-) strand; PAM type: YTN; PAM sequence: TTT
tgaaatcaagtcttgctctg

SEQ ID NO: 15601 - DNA, 20 bp, Artificial Sequence
  Description of Artificial Sequence: Synthetic oligonucleotide
  Target: ANGPTL4; (-) strand; PAM type: YTN; PAM sequence: TTT
ttgaaatcaagtcttgctct

SEQ ID NO: 15602 - DNA, 20 bp, Artificial Sequence
  Description of Artificial Sequence: Synthetic oligonucleotide
  Target: ANGPTL4; (-) strand; PAM type: YTN; PAM sequence: TTT
tttgaaatcaagtcttgctc

SEQ ID NO: 15603 - DNA, 20 bp, Artificial Sequence
  Description of Artificial Sequence: Synthetic oligonucleotide
  Target: ANGPTL4; (-) strand; PAM type: YTN; PAM sequence: TTT
ttttgaaatcaagtcttgct

SEQ ID NO: 15604 - DNA, 20 bp, Artificial Sequence
  Description of Artificial Sequence: Synthetic oligonucleotide
  Target: ANGPTL4; (-) strand; PAM type: YTN; PAM sequence: TTT
tttttgaaatcaagtcttgc

SEQ ID NO: 15605 - DNA, 20 bp, Artificial Sequence
  Description of Artificial Sequence: Synthetic oligonucleotide
  Target: ANGPTL4; (-) strand; PAM type: YTN; PAM sequence: TTT
ttttttgaaatcaagtcttg

SEQ ID NO: 15606 - DNA, 20 bp, Artificial Sequence
  Description of Artificial Sequence: Synthetic oligonucleotide
  Target: ANGPTL4; (-) strand; PAM type: YTN; PAM sequence: TTT
tttttttgaaatcaagtctt

SEQ ID NO: 15607 - DNA, 20 bp, Artificial Sequence
  Description of Artificial Sequence: Synthetic oligonucleotide
  Target: ANGPTL4; (-) strand; PAM type: YTN; PAM sequence: TTT
ttttttttgaaatcaagtct

SEQ ID NO: 15608 - DNA, 20 bp, Artificial Sequence
  Description of Artificial Sequence: Synthetic oligonucleotide
  Target: ANGPTL4; (-) strand; PAM type: YTN; PAM sequence: TTT
tttttttttgaaatcaagtc

SEQ ID NO: 15609 - DNA, 20 bp, Artificial Sequence
  Description of Artificial Sequence: Synthetic oligonucleotide
  Target: ANGPTL4; (-) strand; PAM type: YTN; PAM sequence: TTT
ttttttttttgaaatcaagt

SEQ ID NO: 15610 - DNA, 20 bp, Artificial Sequence
  Description of Artificial Sequence: Synthetic oligonucleotide
  Target: ANGPTL4; (-) strand; PAM type: YTN; PAM sequence: TTT
tttttttttttgaaatcaag

SEQ ID NO: 15611 - DNA, 20 bp, Artificial Sequence
  Description of Artificial Sequence: Synthetic oligonucleotide
  Target: ANGPTL4; (-) strand; PAM type: YTN; PAM sequence: TTT
ttttttttttttgaaatcaa

SEQ ID NO: 15612 - DNA, 20 bp, Artificial Sequence
  Description of Artificial Sequence: Synthetic oligonucleotide
  Target: ANGPTL4; (-) strand; PAM type: YTN; PAM sequence: TTT
tttttttttttttgaaatca

SEQ ID NO: 15613 - DNA, 20 bp, Artificial Sequence
  Description of Artificial Sequence: Synthetic oligonucleotide
  Target: ANGPTL4; (-) strand; PAM type: YTN; PAM sequence: TTT
ttttttttttttttgaaatc

SEQ ID NO: 15614 - DNA, 20 bp, Artificial Sequence
  Description of Artificial Sequence: Synthetic oligonucleotide
  Target: ANGPTL4; (-) strand; PAM type: YTN; PAM sequence: TTT
tttttttttttttttgaaat

SEQ ID NO: 15615 - DNA, 20 bp, Artificial Sequence
  Description of Artificial Sequence: Synthetic oligonucleotide
  Target: ANGPTL4; (-) strand; PAM type: YTN; PAM sequence: TTT
ttttttttttttttttgaaa

SEQ ID NO: 15616 - DNA, 20 bp, Artificial Sequence
  Description of Artificial Sequence: Synthetic oligonucleotide
  Target: ANGPTL4; (-) strand; PAM type: YTN; PAM sequence: TTT
tttttttttttttttttgaa

SEQ ID NO: 15617 - DNA, 20 bp, Artificial Sequence
  Description of Artificial Sequence: Synthetic oligonucleotide
  Target: ANGPTL4; (-) strand; PAM type: YTN; PAM sequence: TTT
ttttttttttttttttttga

SEQ ID NO: 15618 - DNA, 20 bp, Artificial Sequence
  Description of Artificial Sequence: Synthetic oligonucleotide
  Target: ANGPTL4; (-) strand; PAM type: YTN; PAM sequence: TTT
tttttttttttttttttttg

SEQ ID NO: 15619 - DNA, 20 bp, Artificial Sequence
  Description of Artificial Sequence: Synthetic oligonucleotide
  Target: ANGPTL4; (-) strand; PAM type: YTN; PAM sequence: TTT
tttttttttttttttttttt

SEQ ID NO: 15620 - DNA, 20 bp, Artificial Sequence
  Description of Artificial Sequence: Synthetic oligonucleotide
  Target: ANGPTL4; (-) strand; PAM type: YTN; PAM sequence: CTT
tttttttttttttttttttt

SEQ ID NO: 15621 - DNA, 20 bp, Artificial Sequence
  Description of Artificial Sequence: Synthetic oligonucleotide
  Target: ANGPTL4; (-) strand; PAM type: YTN; PAM sequence: TTC
tttttttttttttttttttt

SEQ ID NO: 15622 - DNA, 20 bp, Artificial Sequence
  Description of Artificial Sequence: Synthetic oligonucleotide
  Target: ANGPTL4; (-) strand; PAM type: YTN; PAM sequence: CTA
ttcttttttttttttttttt

SEQ ID NO: 15623 - DNA, 20 bp, Artificial Sequence
  Description of Artificial Sequence: Synthetic oligonucleotide
  Target: ANGPTL4; (-) strand; PAM type: YTN; PAM sequence: TTA
caagtgtgagccaatgcgcc

SEQ ID NO: 15624 - DNA, 20 bp, Artificial Sequence
  Description of Artificial Sequence: Synthetic oligonucleotide
  Target: ANGPTL4; (-) strand; PAM type: YTN; PAM sequence: CTA
gtgttacaagtgtgagccaa

SEQ ID NO: 15625 - DNA, 20 bp, Artificial Sequence
  Description of Artificial Sequence: Synthetic oligonucleotide
  Target: ANGPTL4; (-) strand; PAM type: YTN; PAM sequence: CTC
ccaaagtgctagtgttacaa

SEQ ID NO: 15626 - DNA, 20 bp, Artificial Sequence
  Description of Artificial Sequence: Synthetic oligonucleotide
  Target: ANGPTL4; (-) strand; PAM type: YTN; PAM sequence: TTG
gcctcccaaagtgctagtgt

SEQ ID NO: 15627 - DNA, 20 bp, Artificial Sequence
  Description of Artificial Sequence: Synthetic oligonucleotide
  Target: ANGPTL4; (-) strand; PAM type: YTN; PAM sequence: CTC
gttggcctcccaaagtgcta

SEQ ID NO: 15628 - DNA, 20 bp, Artificial Sequence
  Description of Artificial Sequence: Synthetic oligonucleotide
  Target: ANGPTL4; (-) strand; PAM type: YTN; PAM sequence: CTC
gggtgatccgctcgttggcc

SEQ ID NO: 15629 - DNA, 20 bp, Artificial Sequence
  Description of Artificial Sequence: Synthetic oligonucleotide
  Target: ANGPTL4; (-) strand; PAM type: YTN; PAM sequence: CTA
tatagagcaatacagcggga

SEQ ID NO: 15630 - DNA, 20 bp, Artificial Sequence
  Description of Artificial Sequence: Synthetic oligonucleotide
  Target: ANGPTL4; (-) strand; PAM type: YTN; PAM sequence: CTC
actatatagagcaatacagc

SEQ ID NO: 15631 - DNA, 20 bp, Artificial Sequence
  Description of Artificial Sequence: Synthetic oligonucleotide
  Target: ANGPTL4; (-) strand; PAM type: YTN; PAM sequence: CTA
tatagggatctcactatata

SEQ ID NO: 15632 - DNA, 20 bp, Artificial Sequence
  Description of Artificial Sequence: Synthetic oligonucleotide
  Target: ANGPTL4; (-) strand; PAM type: YTN; PAM sequence: CTG
gacaatagagtgagacccta

SEQ ID NO: 15633 - DNA, 20 bp, Artificial Sequence
  Description of Artificial Sequence: Synthetic oligonucleotide
  Target: ANGPTL4; (-) strand; PAM type: YTN; PAM sequence: TTG
gccaggccagaccagcctgg

SEQ ID NO: 15634 - DNA, 20 bp, Artificial Sequence
  Description of Artificial Sequence: Synthetic oligonucleotide
  Target: ANGPTL4; (-) strand; PAM type: YTN; PAM sequence: TTC
accacattggccaggccaga

SEQ ID NO: 15635 - DNA, 20 bp, Artificial Sequence
  Description of Artificial Sequence: Synthetic oligonucleotide
  Target: ANGPTL4; (-) strand; PAM type: YTN; PAM sequence: TTT
caccacattggccaggccag

SEQ ID NO: 15636 - DNA, 20 bp, Artificial Sequence
  Description of Artificial Sequence: Synthetic oligonucleotide
  Target: ANGPTL4; (-) strand; PAM type: YTN; PAM sequence: TTA
gtagaaatgaggtttcacca

SEQ ID NO: 15637 - DNA, 20 bp, Artificial Sequence
  Description of Artificial Sequence: Synthetic oligonucleotide
  Target: ANGPTL4; (-) strand; PAM type: YTN; PAM sequence: TTT
agtagaaatgaggtttcacc

SEQ ID NO: 15638 - DNA, 20 bp, Artificial Sequence
  Description of Artificial Sequence: Synthetic oligonucleotide
  Target: ANGPTL4; (-) strand; PAM type: YTN; PAM sequence: TTT
tagtagaaatgaggtttcac

SEQ ID NO: 15639 - DNA, 20 bp, Artificial Sequence
  Description of Artificial Sequence: Synthetic oligonucleotide
  Target: ANGPTL4; (-) strand; PAM type: YTN; PAM sequence: TTT
ttagtagaaatgaggtttca

SEQ ID NO: 15640 - DNA, 20 bp, Artificial Sequence
  Description of Artificial Sequence: Synthetic oligonucleotide
  Target: ANGPTL4; (-) strand; PAM type: YTN; PAM sequence: TTG
tatttttagtagaaatgagg

SEQ ID NO: 15641 - DNA, 20 bp, Artificial Sequence
  Description of Artificial Sequence: Synthetic oligonucleotide
  Target: ANGPTL4; (-) strand; PAM type: YTN; PAM sequence: TTT
gtatttttagtagaaatgag

SEQ ID NO: 15642 - DNA, 20 bp, Artificial Sequence
  Description of Artificial Sequence: Synthetic oligonucleotide
  Target: ANGPTL4; (-) strand; PAM type: YTN; PAM sequence: TTT
tgtatttttagtagaaatga

SEQ ID NO: 15643 - DNA, 20 bp, Artificial Sequence
  Description of Artificial Sequence: Synthetic oligonucleotide
  Target: ANGPTL4; (-) strand; PAM type: YTN; PAM sequence: TTT
ttgtatttttagtagaaatg

SEQ ID NO: 15644 - DNA, 20 bp, Artificial Sequence
  Description of Artificial Sequence: Synthetic oligonucleotide
  Target: ANGPTL4; (-) strand; PAM type: YTN; PAM sequence: CTA
atttttgtatttttagtaga

SEQ ID NO: 15645 - DNA, 20 bp, Artificial Sequence
  Description of Artificial Sequence: Synthetic oligonucleotide
  Target: ANGPTL4; (-) strand; PAM type: YTN; PAM sequence: CTA
tgcccagctaatttttgtat

SEQ ID NO: 15646 - DNA, 20 bp, Artificial Sequence
  Description of Artificial Sequence: Synthetic oligonucleotide
  Target: ANGPTL4; (-) strand; PAM type: YTN; PAM sequence: TTA
taggtgcgcatcactatgcc

SEQ ID NO: 15647 - DNA, 20 bp, Artificial Sequence
  Description of Artificial Sequence: Synthetic oligonucleotide
  Target: ANGPTL4; (-) strand; PAM type: YTN; PAM sequence: CTG
ggattataggtgcgcatcac

SEQ ID NO: 15648 - DNA, 20 bp, Artificial Sequence
  Description of Artificial Sequence: Synthetic oligonucleotide
  Target: ANGPTL4; (-) strand; PAM type: YTN; PAM sequence: CTG
agtagctgggattataggtg

SEQ ID NO: 15649 - DNA, 20 bp, Artificial Sequence
  Description of Artificial Sequence: Synthetic oligonucleotide
  Target: ANGPTL4; (-) strand; PAM type: YTN; PAM sequence: CTC
ctgagtagctgggattatag

SEQ ID NO: 15650 - DNA, 20 bp, Artificial Sequence
  Description of Artificial Sequence: Synthetic oligonucleotide
  Target: ANGPTL4; (-) strand; PAM type: YTN; PAM sequence: CTC
agcctcctgagtagctggga

SEQ ID NO: 15651 - DNA, 20 bp, Artificial Sequence
  Description of Artificial Sequence: Synthetic oligonucleotide
  Target: ANGPTL4; (-) strand; PAM type: YTN; PAM sequence: CTC
cggcctcagcctcctgagta

SEQ ID NO: 15652 - DNA, 20 bp, Artificial Sequence
  Description of Artificial Sequence: Synthetic oligonucleotide
  Target: ANGPTL4; (-) strand; PAM type: YTN; PAM sequence: TTC
tccggcctcagcctcctgag

SEQ ID NO: 15653 - DNA, 20 bp, Artificial Sequence
  Description of Artificial Sequence: Synthetic oligonucleotide
  Target: ANGPTL4; (-) strand; PAM type: YTN; PAM sequence: TTC
aagcaattctccggcctcag

SEQ ID NO: 15654 - DNA, 20 bp, Artificial Sequence
  Description of Artificial Sequence: Synthetic oligonucleotide
  Target: ANGPTL4; (-) strand; PAM type: YTN; PAM sequence: CTG
ggttcaagcaattctccggc

SEQ ID NO: 15655 - DNA, 20 bp, Artificial Sequence
  Description of Artificial Sequence: Synthetic oligonucleotide
  Target: ANGPTL4; (-) strand; PAM type: YTN; PAM sequence: CTC
ctgggttcaagcaattctcc

SEQ ID NO: 15656 - DNA, 20 bp, Artificial Sequence
  Description of Artificial Sequence: Synthetic oligonucleotide
  Target: ANGPTL4; (-) strand; PAM type: YTN; PAM sequence: CTC
cacctcctgggttcaagcaa

SEQ ID NO: 15657 - DNA, 20 bp, Artificial Sequence
  Description of Artificial Sequence: Synthetic oligonucleotide
  Target: ANGPTL4; (-) strand; PAM type: YTN; PAM sequence: CTG
caacctccacctcctgggtt

SEQ ID NO: 15658 - DNA, 20 bp, Artificial Sequence
  Description of Artificial Sequence: Synthetic oligonucleotide
  Target: ANGPTL4; (-) strand; PAM type: YTN; PAM sequence: CTC
actgcaacctccacctcctg

SEQ ID NO: 15659 - DNA, 20 bp, Artificial Sequence
  Description of Artificial Sequence: Synthetic oligonucleotide
  Target: ANGPTL4; (-) strand; PAM type: YTN; PAM sequence: CTC
ggctcactgcaacctccacc

SEQ ID NO: 15660 - DNA, 20 bp, Artificial Sequence
  Description of Artificial Sequence: Synthetic oligonucleotide
  Target: ANGPTL4; (-) strand; PAM type: YTN; PAM sequence: CTC
agcgccatctcggctcactg

SEQ ID NO: 15661 - DNA, 20 bp, Artificial Sequence
  Description of Artificial Sequence: Synthetic oligonucleotide
  Target: ANGPTL4; (-) strand; PAM type: YTN; PAM sequence: CTC
tcagcgccatctcggctcac

SEQ ID NO: 15662 - DNA, 20 bp, Artificial Sequence
  Description of Artificial Sequence: Synthetic oligonucleotide
  Target: ANGPTL4; (-) strand; PAM type: YTN; PAM sequence: CTG
tcacctctcagcgccatctc

SEQ ID NO: 15663 - DNA, 20 bp, Artificial Sequence
  Description of Artificial Sequence: Synthetic oligonucleotide
  Target: ANGPTL4; (-) strand; PAM type: YTN; PAM sequence: CTG
ccagcacgctgtcacctctc

SEQ ID NO: 15664 - DNA, 20 bp, Artificial Sequence
  Description of Artificial Sequence: Synthetic oligonucleotide
  Target: ANGPTL4; (-) strand; PAM type: YTN; PAM sequence: CTG
tgaggactgccagcacgctg

SEQ ID NO: 15665 - DNA, 20 bp, Artificial Sequence
  Description of Artificial Sequence: Synthetic oligonucleotide
  Target: ANGPTL4; (-) strand; PAM type: YTN; PAM sequence: CTG
aagtgccgccacagtgggag

SEQ ID NO: 15666 - DNA, 20 bp, Artificial Sequence
  Description of Artificial Sequence: Synthetic oligonucleotide
  Target: ANGPTL4; (-) strand; PAM type: YTN; PAM sequence: CTC
ctgaagtgccgccacagtgg

SEQ ID NO: 15667 - DNA, 20 bp, Artificial Sequence
  Description of Artificial Sequence: Synthetic oligonucleotide
  Target: ANGPTL4; (-) strand; PAM type: YTN; PAM sequence: CTG
aagggctcctgaagtgccgc

SEQ ID NO: 15668 - DNA, 20 bp, Artificial Sequence
  Description of Artificial Sequence: Synthetic oligonucleotide
  Target: ANGPTL4; (-) strand; PAM type: YTN; PAM sequence: CTC
ccacagtgcagcggtgggct

SEQ ID NO: 15669 - DNA, 20 bp, Artificial Sequence
  Description of Artificial Sequence: Synthetic oligonucleotide
  Target: ANGPTL4; (-) strand; PAM type: YTN; PAM sequence: TTG
gccagcccagaaaggggctc

SEQ ID NO: 15670 - DNA, 20 bp, Artificial Sequence
  Description of Artificial Sequence: Synthetic oligonucleotide
  Target: ANGPTL4; (-) strand; PAM type: YTN; PAM sequence: CTT
ggccagcccagaaaggggct

SEQ ID NO: 15671 - DNA, 20 bp, Artificial Sequence
  Description of Artificial Sequence: Synthetic oligonucleotide
  Target: ANGPTL4; (-) strand; PAM type: YTN; PAM sequence: CTC
cggccttggccagcccagaa

SEQ ID NO: 15672 - DNA, 20 bp, Artificial Sequence
  Description of Artificial Sequence: Synthetic oligonucleotide
  Target: ANGPTL4; (-) strand; PAM type: YTN; PAM sequence: CTG
agggagccagctccggcctt

SEQ ID NO: 15673 - DNA, 20 bp, Artificial Sequence
  Description of Artificial Sequence: Synthetic oligonucleotide
  Target: ANGPTL4; (-) strand; PAM type: YTN; PAM sequence: CTG
caagctgagggagccagctc

SEQ ID NO: 15674 - DNA, 20 bp, Artificial Sequence
  Description of Artificial Sequence: Synthetic oligonucleotide
  Target: ANGPTL4; (-) strand; PAM type: YTN; PAM sequence: TTC
cctgcaagctgagggagcca

SEQ ID NO: 15675 - DNA, 20 bp, Artificial Sequence
  Description of Artificial Sequence: Synthetic oligonucleotide
  Target: ANGPTL4; (-) strand; PAM type: YTN; PAM sequence: CTT
ccctgcaagctgagggagcc

SEQ ID NO: 15676 - DNA, 20 bp, Artificial Sequence
  Description of Artificial Sequence: Synthetic oligonucleotide
  Target: ANGPTL4; (-) strand; PAM type: YTN; PAM sequence: CTC
cacacttccctgcaagctga

SEQ ID NO: 15677 - DNA, 20 bp, Artificial Sequence
  Description of Artificial Sequence: Synthetic oligonucleotide
  Target: ANGPTL4; (-) strand; PAM type: YTN; PAM sequence: CTC
cctccacacttccctgcaag

SEQ ID NO: 15678 - DNA, 20 bp, Artificial Sequence
  Description of Artificial Sequence: Synthetic oligonucleotide
  Target: ANGPTL4; (-) strand; PAM type: YTN; PAM sequence: CTC
tccctccacacttccctgca

SEQ ID NO: 15679 - DNA, 20 bp, Artificial Sequence
  Description of Artificial Sequence: Synthetic oligonucleotide
  Target: ANGPTL4; (-) strand; PAM type: YTN; PAM sequence: CTC
gcgcctctccctccacactt

SEQ ID NO: 15680 - DNA, 20 bp, Artificial Sequence
  Description of Artificial Sequence: Synthetic oligonucleotide
  Target: ANGPTL4; (-) strand; PAM type: YTN; PAM sequence: TTC
cggctcgcgcctctccctcc

SEQ ID NO: 15681 - DNA, 20 bp, Artificial Sequence
  Description of Artificial Sequence: Synthetic oligonucleotide
  Target: ANGPTL4; (-) strand; PAM type: YTN; PAM sequence: CTG
gcccacaagcaccgcgcgca

SEQ ID NO: 15682 - DNA, 20 bp, Artificial Sequence
  Description of Artificial Sequence: Synthetic oligonucleotide
  Target: ANGPTL4; (-) strand; PAM type: YTN; PAM sequence: CTC
cagctggcccacaagcaccg

SEQ ID NO: 15683 - DNA, 20 bp, Artificial Sequence
  Description of Artificial Sequence: Synthetic oligonucleotide
  Target: ANGPTL4; (-) strand; PAM type: YTN; PAM sequence: CTG
agtgcagggtccgccaagcc

SEQ ID NO: 15684 - DNA, 20 bp, Artificial Sequence
  Description of Artificial Sequence: Synthetic oligonucleotide
  Target: ANGPTL4; (-) strand; PAM type: YTN; PAM sequence: CTC
tgagtgcagggtccgccaag

SEQ ID NO: 15685 - DNA, 20 bp, Artificial Sequence
  Description of Artificial Sequence: Synthetic oligonucleotide
  Target: ANGPTL4; (-) strand; PAM type: YTN; PAM sequence: CTG
ctctgagtgcagggtccgcc

SEQ ID NO: 15686 - DNA, 20 bp, Artificial Sequence
  Description of Artificial Sequence: Synthetic oligonucleotide
  Target: ANGPTL4; (-) strand; PAM type: YTN; PAM sequence: TTG
cccggggccagcagggccgg

SEQ ID NO: 15687 - DNA, 20 bp, Artificial Sequence
  Description of Artificial Sequence: Synthetic oligonucleotide
  Target: ANGPTL4; (-) strand; PAM type: YTN; PAM sequence: CTC
attgcccggggccagcaggg

SEQ ID NO: 15688 - DNA, 20 bp, Artificial Sequence
  Description of Artificial Sequence: Synthetic oligonucleotide
  Target: ANGPTL4; (-) strand; PAM type: YTN; PAM sequence: CTA
agcccctcattgcccggggc

SEQ ID NO: 15689 - DNA, 20 bp, Artificial Sequence
  Description of Artificial Sequence: Synthetic oligonucleotide
  Target: ANGPTL4; (-) strand; PAM type: YTN; PAM sequence: CTG
tccggcccgggtgctaagcc

SEQ ID NO: 15690 - DNA, 20 bp, Artificial Sequence
  Description of Artificial Sequence: Synthetic oligonucleotide
  Target: ANGPTL4; (-) strand; PAM type: YTN; PAM sequence: CTC
cgcagccgctgtccggcccg

SEQ ID NO: 15691 - DNA, 20 bp, Artificial Sequence
  Description of Artificial Sequence: Synthetic oligonucleotide
  Target: ANGPTL4; (-) strand; PAM type: YTN; PAM sequence: CTG
ggggacccagtacaccctcc

SEQ ID NO: 15692 - DNA, 20 bp, Artificial Sequence
  Description of Artificial Sequence: Synthetic oligonucleotide
  Target: ANGPTL4; (-) strand; PAM type: YTN; PAM sequence: CTG
ctgggggacccagtacaccc

SEQ ID NO: 15693 - DNA, 20 bp, Artificial Sequence
  Description of Artificial Sequence: Synthetic oligonucleotide
  Target: ANGPTL4; (-) strand; PAM type: YTN; PAM sequence: CTG
gcactgctgggggacccagt

SEQ ID NO: 15694 - DNA, 20 bp, Artificial Sequence
  Description of Artificial Sequence: Synthetic oligonucleotide
  Target: ANGPTL4; (-) strand; PAM type: YTN; PAM sequence: CTG
gtgagaaatcaagcgcagcg

SEQ ID NO: 15695 - DNA, 20 bp, Artificial Sequence
  Description of Artificial Sequence: Synthetic oligonucleotide
  Target: ANGPTL4; (-) strand; PAM type: YTN; PAM sequence: CTA
aggcctggtgagaaatcaag

SEQ ID NO: 15696 - DNA, 20 bp, Artificial Sequence
  Description of Artificial Sequence: Synthetic oligonucleotide
  Target: ANGPTL4; (-) strand; PAM type: YTN; PAM sequence: CTG
ccccgcgggaaggcagctaa

SEQ ID NO: 15697 - DNA, 20 bp, Artificial Sequence
  Description of Artificial Sequence: Synthetic oligonucleotide
  Target: ANGPTL4; (-) strand; PAM type: YTN; PAM sequence: CTG
caggtcccgatccctgcccc

SEQ ID NO: 15698 - DNA, 20 bp, Artificial Sequence
  Description of Artificial Sequence: Synthetic oligonucleotide
  Target: ANGPTL4; (-) strand; PAM type: YTN; PAM sequence: CTC
aggcatggcgggctgcaggt

SEQ ID NO: 15699 - DNA, 20 bp, Artificial Sequence
  Description of Artificial Sequence: Synthetic oligonucleotide
  Target: ANGPTL4; (-) strand; PAM type: YTN; PAM sequence: CTC
gtcagggaggcgcgggccgc

SEQ ID NO: 15700 - DNA, 20 bp, Artificial Sequence
  Description of Artificial Sequence: Synthetic oligonucleotide
  Target: ANGPTL4; (-) strand; PAM type: YTN; PAM sequence: CTG
ggcaccatggagcatggggc

SEQ ID NO: 15701 - DNA, 20 bp, Artificial Sequence
  Description of Artificial Sequence: Synthetic oligonucleotide
  Target: ANGPTL4; (-) strand; PAM type: YTN; PAM sequence: TTG
ggtggtggatgggactgggc

SEQ ID NO: 15702 - DNA, 20 bp, Artificial Sequence
  Description of Artificial Sequence: Synthetic oligonucleotide
  Target: ANGPTL4; (-) strand; PAM type: YTN; PAM sequence: CTT
gggtggtggatgggactggg

SEQ ID NO: 15703 - DNA, 20 bp, Artificial Sequence
  Description of Artificial Sequence: Synthetic oligonucleotide
  Target: ANGPTL4; (-) strand; PAM type: YTN; PAM sequence: CTC
agcccttgggtggtggatgg

SEQ ID NO: 15704 - DNA, 20 bp, Artificial Sequence
  Description of Artificial Sequence: Synthetic oligonucleotide
  Target: ANGPTL4; (-) strand; PAM type: YTN; PAM sequence: CTC
ctcagcccttgggtggtgga

SEQ ID NO: 15705 - DNA, 20 bp, Artificial Sequence
  Description of Artificial Sequence: Synthetic oligonucleotide
  Target: ANGPTL4; (-) strand; PAM type: YTN; PAM sequence: CTG
cactcctcagcccttgggtg

SEQ ID NO: 15706 - DNA, 20 bp, Artificial Sequence
  Description of Artificial Sequence: Synthetic oligonucleotide
  Target: ANGPTL4; (-) strand; PAM type: YTN; PAM sequence: CTG
ccagtcccacgccgtgcgcc

SEQ ID NO: 15707 - DNA, 20 bp, Artificial Sequence
  Description of Artificial Sequence: Synthetic oligonucleotide
  Target: ANGPTL4; (-) strand; PAM type: YTN; PAM sequence: CTG
cctgccagtcccacgccgtg

SEQ ID NO: 15708 - DNA, 20 bp, Artificial Sequence
  Description of Artificial Sequence: Synthetic oligonucleotide
  Target: ANGPTL4; (-) strand; PAM type: YTN; PAM sequence: CTG
caggtggagctgcctgccag

SEQ ID NO: 15709 - DNA, 20 bp, Artificial Sequence
  Description of Artificial Sequence: Synthetic oligonucleotide
  Target: ANGPTL4; (-) strand; PAM type: YTN; PAM sequence: CTG
caccggggctgcaggtggag

SEQ ID NO: 15710 - DNA, 20 bp, Artificial Sequence
  Description of Artificial Sequence: Synthetic oligonucleotide
  Target: ANGPTL4; (-) strand; PAM type: YTN; PAM sequence: TTC
acccagtggatcctgcaccg

SEQ ID NO: 15711 - DNA, 20 bp, Artificial Sequence
  Description of Artificial Sequence: Synthetic oligonucleotide
  Target: ANGPTL4; (-) strand; PAM type: YTN; PAM sequence: CTT
cacccagtggatcctgcacc

SEQ ID NO: 15712 - DNA, 20 bp, Artificial Sequence
  Description of Artificial Sequence: Synthetic oligonucleotide
  Target: ANGPTL4; (-) strand; PAM type: YTN; PAM sequence: CTA
gcttcacccagtggatcctg

SEQ ID NO: 15713 - DNA, 20 bp, Artificial Sequence
  Description of Artificial Sequence: Synthetic oligonucleotide
  Target: ANGPTL4; (-) strand; PAM type: YTN; PAM sequence: CTC
aggagcccagctagcttcac

SEQ ID NO: 15714 - DNA, 20 bp, Artificial Sequence
  Description of Artificial Sequence: Synthetic oligonucleotide
  Target: ANGPTL4; (-) strand; PAM type: YTN; PAM sequence: CTC
cacgtccccaccagactcag

SEQ ID NO: 15715 - DNA, 20 bp, Artificial Sequence
  Description of Artificial Sequence: Synthetic oligonucleotide
  Target: ANGPTL4; (-) strand; PAM type: YTN; PAM sequence: TTC
tccacgtccccaccagactc

SEQ ID NO: 15716 - DNA, 20 bp, Artificial Sequence
  Description of Artificial Sequence: Synthetic oligonucleotide
  Target: ANGPTL4; (-) strand; PAM type: YTN; PAM sequence: CTA
gacaaaggttctccacgtcc

SEQ ID NO: 15717 - DNA, 20 bp, Artificial Sequence
  Description of Artificial Sequence: Synthetic oligonucleotide
  Target: ANGPTL4; (-) strand; PAM type: YTN; PAM sequence: CTG
agctagacaaaggttctcca

SEQ ID NO: 15718 - DNA, 20 bp, Artificial Sequence
  Description of Artificial Sequence: Synthetic oligonucleotide
  Target: ANGPTL4; (-) strand; PAM type: YTN; PAM sequence: TTA
caatccctgagctagacaaa

SEQ ID NO: 15719 - DNA, 20 bp, Artificial Sequence
  Description of Artificial Sequence: Synthetic oligonucleotide
  Target: ANGPTL4; (-) strand; PAM type: YTN; PAM sequence: TTT
acaatccctgagctagacaa

SEQ ID NO: 15720 - DNA, 20 bp, Artificial Sequence
  Description of Artificial Sequence: Synthetic oligonucleotide
  Target: ANGPTL4; (-) strand; PAM type: YTN; PAM sequence: TTG
gtgtatttacaatccctgag

SEQ ID NO: 15721 - DNA, 20 bp, Artificial Sequence
  Description of Artificial Sequence: Synthetic oligonucleotide
  Target: ANGPTL4; (-) strand; PAM type: YTN; PAM sequence: CTA
gacatagggtgatgattggt

SEQ ID NO: 15722 - DNA, 20 bp, Artificial Sequence
  Description of Artificial Sequence: Synthetic oligonucleotide
  Target: ANGPTL4; (-) strand; PAM type: YTN; PAM sequence: CTG
agctagacatagggtgatga

SEQ ID NO: 15723 - DNA, 20 bp, Artificial Sequence
  Description of Artificial Sequence: Synthetic oligonucleotide
  Target: ANGPTL4; (-) strand; PAM type: YTN; PAM sequence: TTC
acaaaccctgagctagacat

SEQ ID NO: 15724 - DNA, 20 bp, Artificial Sequence
  Description of Artificial Sequence: Synthetic oligonucleotide
  Target: ANGPTL4; (-) strand; PAM type: YTN; PAM sequence: TTG
gtgcattcacaaaccctgag

SEQ ID NO: 15725 - DNA, 20 bp, Artificial Sequence
  Description of Artificial Sequence: Synthetic oligonucleotide
  Target: ANGPTL4; (-) strand; PAM type: YTN; PAM sequence: TTC
attggtgcattcacaaaccc

SEQ ID NO: 15726 - DNA, 20 bp, Artificial Sequence
  Description of Artificial Sequence: Synthetic oligonucleotide
  Target: ANGPTL4; (-) strand; PAM type: YTN; PAM sequence: CTA
gatacagagtgttcattggt

SEQ ID NO: 15727 - DNA, 20 bp, Artificial Sequence
  Description of Artificial Sequence: Synthetic oligonucleotide
  Target: ANGPTL4; (-) strand; PAM type: YTN; PAM sequence: CTC
caaggccccaccagagtagc

SEQ ID NO: 15728 - DNA, 20 bp, Artificial Sequence
  Description of Artificial Sequence: Synthetic oligonucleotide
  Target: ANGPTL4; (-) strand; PAM type: YTN; PAM sequence: TTC
tccaaggccccaccagagta

SEQ ID NO: 15729 - DNA, 20 bp, Artificial Sequence
  Description of Artificial Sequence: Synthetic oligonucleotide
  Target: ANGPTL4; (-) strand; PAM type: YTN; PAM sequence: CTA
gacataaaggttctccaagg

SEQ ID NO: 15730 - DNA, 20 bp, Artificial Sequence
  Description of Artificial Sequence: Synthetic oligonucleotide
  Target: ANGPTL4; (-) strand; PAM type: YTN; PAM sequence: CTG
agctagacataaaggttctc

SEQ ID NO: 15731 - DNA, 20 bp, Artificial Sequence
  Description of Artificial Sequence: Synthetic oligonucleotide
  Target: ANGPTL4; (-) strand; PAM type: YTN; PAM sequence: TTA
caatccctgagctagacata

SEQ ID NO: 15732 - DNA, 20 bp, Artificial Sequence
  Description of Artificial Sequence: Synthetic oligonucleotide
  Target: ANGPTL4; (-) strand; PAM type: YTN; PAM sequence: TTT
acaatccctgagctagacat

SEQ ID NO: 15733 - DNA, 20 bp, Artificial Sequence
  Description of Artificial Sequence: Synthetic oligonucleotide
  Target: ANGPTL4; (-) strand; PAM type: YTN; PAM sequence: TTG
gtgtatttacaatccctgag

SEQ ID NO: 15734 - DNA, 20 bp, Artificial Sequence
  Description of Artificial Sequence: Synthetic oligonucleotide
  Target: ANGPTL4; (-) strand; PAM type: YTN; PAM sequence: CTA
gatacagagtgccgattggt

SEQ ID NO: 15735 - DNA, 20 bp, Artificial Sequence
  Description of Artificial Sequence: Synthetic oligonucleotide
  Target: ANGPTL4; (-) strand; PAM type: YTN; PAM sequence: TTG
agctagatacagagtgccga

SEQ ID NO: 15736 - DNA, 20 bp, Artificial Sequence
  Description of Artificial Sequence: Synthetic oligonucleotide
  Target: ANGPTL4; (-) strand; PAM type: YTN; PAM sequence: CTT
gagctagatacagagtgccg

SEQ ID NO: 15737 - DNA, 20 bp, Artificial Sequence
  Description of Artificial Sequence: Synthetic oligonucleotide
  Target: ANGPTL4; (-) strand; PAM type: YTN; PAM sequence: TTA
caaaccttgagctagataca

SEQ ID NO: 15738 - DNA, 20 bp, Artificial Sequence
  Description of Artificial Sequence: Synthetic oligonucleotide
  Target: ANGPTL4; (-) strand; PAM type: YTN; PAM sequence: TTT
acaaaccttgagctagatac

SEQ ID NO: 15739 - DNA, 20 bp, Artificial Sequence
  Description of Artificial Sequence: Synthetic oligonucleotide
  Target: ANGPTL4; (-) strand; PAM type: YTN; PAM sequence: TTG
gtgtgtttacaaaccttgag

SEQ ID NO: 15740 - DNA, 20 bp, Artificial Sequence
  Description of Artificial Sequence: Synthetic oligonucleotide
  Target: ANGPTL4; (-) strand; PAM type: YTN; PAM sequence: CTG
attggtgtgtttacaaacct

SEQ ID NO: 15741 - DNA, 20 bp, Artificial Sequence
  Description of Artificial Sequence: Synthetic oligonucleotide
  Target: ANGPTL4; (-) strand; PAM type: YTN; PAM sequence: CTA
gacacagggtgctgattggt

SEQ ID NO: 15742 - DNA, 20 bp, Artificial Sequence
  Description of Artificial Sequence: Synthetic oligonucleotide
  Target: ANGPTL4; (-) strand; PAM type: YTN; PAM sequence: CTG
agctagacacagggtgctga

SEQ ID NO: 15743 - DNA, 20 bp, Artificial Sequence
  Description of Artificial Sequence: Synthetic oligonucleotide
  Target: ANGPTL4; (-) strand; PAM type: YTN; PAM sequence: TTC
acaaaccctgagctagacac

SEQ ID NO: 15744 - DNA, 20 bp, Artificial Sequence
  Description of Artificial Sequence: Synthetic oligonucleotide
  Target: ANGPTL4; (-) strand; PAM type: YTN; PAM sequence: TTG
gtgcattcacaaaccctgag

SEQ ID NO: 15745 - DNA, 20 bp, Artificial Sequence
  Description of Artificial Sequence: Synthetic oligonucleotide
  Target: ANGPTL4; (-) strand; PAM type: YTN; PAM sequence: CTA
gatacagagtgtcgattggt

SEQ ID NO: 15746 - DNA, 20 bp, Artificial Sequence
  Description of Artificial Sequence: Synthetic oligonucleotide
  Target: ANGPTL4; (-) strand; PAM type: YTN; PAM sequence: CTC
caaggccccaccacagtagc

SEQ ID NO: 15747 - DNA, 20 bp, Artificial Sequence
  Description of Artificial Sequence: Synthetic oligonucleotide
  Target: ANGPTL4; (-) strand; PAM type: YTN; PAM sequence: TTC
tccaaggccccaccacagta

SEQ ID NO: 15748 - DNA, 20 bp, Artificial Sequence
  Description of Artificial Sequence: Synthetic oligonucleotide
  Target: ANGPTL4; (-) strand; PAM type: YTN; PAM sequence: CTA
gatacagagtgtcaacacaa

SEQ ID NO: 15749 - DNA, 20 bp, Artificial Sequence
  Description of Artificial Sequence: Synthetic oligonucleotide
  Target: ANGPTL4; (-) strand; PAM type: YTN; PAM sequence: TTA
actagatacagagtgtcaac

SEQ ID NO: 15750 - DNA, 20 bp, Artificial Sequence
  Description of Artificial Sequence: Synthetic oligonucleotide
  Target: ANGPTL4; (-) strand; PAM type: YTN; PAM sequence: CTC
cacatccccaccagattaac

SEQ ID NO: 15751 - DNA, 20 bp, Artificial Sequence
  Description of Artificial Sequence: Synthetic oligonucleotide
  Target: ANGPTL4; (-) strand; PAM type: YTN; PAM sequence: TTC
tccacatccccaccagatta

SEQ ID NO: 15752 - DNA, 20 bp, Artificial Sequence
  Description of Artificial Sequence: Synthetic oligonucleotide
  Target: ANGPTL4; (-) strand; PAM type: YTN; PAM sequence: CTA
gacacaaaggttctccacat

SEQ ID NO: 15753 - DNA, 20 bp, Artificial Sequence
  Description of Artificial Sequence: Synthetic oligonucleotide
  Target: ANGPTL4; (-) strand; PAM type: YTN; PAM sequence: CTG
agctagacacaaaggttctc

SEQ ID NO: 15754 - DNA, 20 bp, Artificial Sequence
  Description of Artificial Sequence: Synthetic oligonucleotide
  Target: ANGPTL4; (-) strand; PAM type: YTN; PAM sequence: TTC
ctgagctagacacaaaggtt

SEQ ID NO: 15755 - DNA, 20 bp, Artificial Sequence
  Description of Artificial Sequence: Synthetic oligonucleotide
  Target: ANGPTL4; (-) strand; PAM type: YTN; PAM sequence: TTA
caattcctgagctagacaca

SEQ ID NO: 15756 - DNA, 20 bp, Artificial Sequence
  Description of Artificial Sequence: Synthetic oligonucleotide
  Target: ANGPTL4; (-) strand; PAM type: YTN; PAM sequence: TTT
acaattcctgagctagacac

SEQ ID NO: 15757 - DNA, 20 bp, Artificial Sequence
  Description of Artificial Sequence: Synthetic oligonucleotide
  Target: ANGPTL4; (-) strand; PAM type: YTN; PAM sequence: TTG
gtgcgtttacaattcctgag

SEQ ID NO: 15758 - DNA, 20 bp, Artificial Sequence
  Description of Artificial Sequence: Synthetic oligonucleotide
  Target: ANGPTL4; (-) strand; PAM type: YTN; PAM sequence: CTG
attggtgcgtttacaattcc

SEQ ID NO: 15759 - DNA, 20 bp, Artificial Sequence
  Description of Artificial Sequence: Synthetic oligonucleotide
  Target: ANGPTL4; (-) strand; PAM type: YTN; PAM sequence: TTG
acagggcgctgattggtgcg

SEQ ID NO: 15760 - DNA, 20 bp, Artificial Sequence
  Description of Artificial Sequence: Synthetic oligonucleotide
  Target: ANGPTL4; (-) strand; PAM type: YTN; PAM sequence: TTT
gacagggcgctgattggtgc

SEQ ID NO: 15761 - DNA, 20 bp, Artificial Sequence
  Description of Artificial Sequence: Synthetic oligonucleotide
  Target: ANGPTL4; (-) strand; PAM type: YTN; PAM sequence: TTT
tgacagggcgctgattggtg

SEQ ID NO: 15762 - DNA, 20 bp, Artificial Sequence
  Description of Artificial Sequence: Synthetic oligonucleotide
  Target: ANGPTL4; (-) strand; PAM type: YTN; PAM sequence: CTG
ttttgacagggcgctgattg

SEQ ID NO: 15763 - DNA, 20 bp, Artificial Sequence
  Description of Artificial Sequence: Synthetic oligonucleotide
  Target: ANGPTL4; (-) strand; PAM type: YTN; PAM sequence: CTG
gtctgttttgacagggcgct

SEQ ID NO: 15764 - DNA, 20 bp, Artificial Sequence
  Description of Artificial Sequence: Synthetic oligonucleotide
  Target: ANGPTL4; (-) strand; PAM type: YTN; PAM sequence: TTG
gtagagcccactggtctgtt

SEQ ID NO: 15765 - DNA, 20 bp, Artificial Sequence
  Description of Artificial Sequence: Synthetic oligonucleotide
  Target: ANGPTL4; (-) strand; PAM type: YTN; PAM sequence: CTG
attggtagagcccactggtc

SEQ ID NO: 15766 - DNA, 20 bp, Artificial Sequence
  Description of Artificial Sequence: Synthetic oligonucleotide
  Target: ANGPTL4; (-) strand; PAM type: YTN; PAM sequence: CTG
ctgattggtagagcccactg

SEQ ID NO: 15767 - DNA, 20 bp, Artificial Sequence
  Description of Artificial Sequence: Synthetic oligonucleotide
  Target: ANGPTL4; (-) strand; PAM type: YTN; PAM sequence: CTG
gccccacccacatcctgctg

SEQ ID NO: 15768 - DNA, 20 bp, Artificial Sequence
  Description of Artificial Sequence: Synthetic oligonucleotide
  Target: ANGPTL4; (-) strand; PAM type: YTN; PAM sequence: TTA
tctggccccacccacatcct

SEQ ID NO: 15769 - DNA, 20 bp, Artificial Sequence
  Description of Artificial Sequence: Synthetic oligonucleotide
  Target: ANGPTL4; (-) strand; PAM type: YTN; PAM sequence: CTT
atctggccccacccacatcc

SEQ ID NO: 15770 - DNA, 20 bp, Artificial Sequence
  Description of Artificial Sequence: Synthetic oligonucleotide
  Target: ANGPTL4; (-) strand; PAM type: YTN; PAM sequence: CTC
ttatctggccccacccacat

SEQ ID NO: 15771 - DNA, 20 bp, Artificial Sequence
  Description of Artificial Sequence: Synthetic oligonucleotide
  Target: ANGPTL4; (-) strand; PAM type: YTN; PAM sequence: TTC
tcttatctggccccacccac

SEQ ID NO: 15772 - DNA, 20 bp, Artificial Sequence
  Description of Artificial Sequence: Synthetic oligonucleotide
  Target: ANGPTL4; (-) strand; PAM type: YTN; PAM sequence: TTA
ttctcttatctggccccacc

SEQ ID NO: 15773 - DNA, 20 bp, Artificial Sequence
  Description of Artificial Sequence: Synthetic oligonucleotide
  Target: ANGPTL4; (-) strand; PAM type: YTN; PAM sequence: TTT
attctcttatctggccccac

SEQ ID NO: 15774 - DNA, 20 bp, Artificial Sequence
  Description of Artificial Sequence: Synthetic oligonucleotide
  Target: ANGPTL4; (-) strand; PAM type: YTN; PAM sequence: TTT
tattctcttatctggcccca

SEQ ID NO: 15775 - DNA, 20 bp, Artificial Sequence
  Description of Artificial Sequence: Synthetic oligonucleotide
  Target: ANGPTL4; (-) strand; PAM type: YTN; PAM sequence: CTT
ttattctcttatctggcccc

SEQ ID NO: 15776 - DNA, 20 bp, Artificial Sequence
  Description of Artificial Sequence: Synthetic oligonucleotide
  Target: ANGPTL4; (-) strand; PAM type: YTN; PAM sequence: CTG
cttttattctcttatctggc

SEQ ID NO: 15777 - DNA, 20 bp, Artificial Sequence
  Description of Artificial Sequence: Synthetic oligonucleotide
  Target: ANGPTL4; (-) strand; PAM type: YTN; PAM sequence: CTC
gggcagcctgcttttattct

SEQ ID NO: 15778 - DNA, 20 bp, Artificial Sequence
  Description of Artificial Sequence: Synthetic oligonucleotide
  Target: ANGPTL4; (-) strand; PAM type: YTN; PAM sequence: CTG
gctcgggcagcctgctttta

SEQ ID NO: 15779 - DNA, 20 bp, Artificial Sequence
  Description of Artificial Sequence: Synthetic oligonucleotide
  Target: ANGPTL4; (-) strand; PAM type: YTN; PAM sequence: CTG
ctggctcgggcagcctgctt

SEQ ID NO: 15780 - DNA, 20 bp, Artificial Sequence
  Description of Artificial Sequence: Synthetic oligonucleotide
  Target: ANGPTL4; (-) strand; PAM type: YTN; PAM sequence: TTG
ccactgctggctcgggcagc

SEQ ID NO: 15781 - DNA, 20 bp, Artificial Sequence
  Description of Artificial Sequence: Synthetic oligonucleotide
  Target: ANGPTL4; (-) strand; PAM type: YTN; PAM sequence: TTC
cacagtgtggaaggggaccc

SEQ ID NO: 15782 - DNA, 20 bp, Artificial Sequence
  Description of Artificial Sequence: Synthetic oligonucleotide
  Target: ANGPTL4; (-) strand; PAM type: YTN; PAM sequence: CTT
ccacagtgtggaaggggacc

SEQ ID NO: 15783 - DNA, 20 bp, Artificial Sequence
  Description of Artificial Sequence: Synthetic oligonucleotide
  Target: ANGPTL4; (-) strand; PAM type: YTN; PAM sequence: TTG
caaagagcaaaagaacaaag

SEQ ID NO: 15784 - DNA, 20 bp, Artificial Sequence
  Description of Artificial Sequence: Synthetic oligonucleotide
  Target: ANGPTL4; (-) strand; PAM type: YTN; PAM sequence: TTA
ttgcaaagagcaaaagaaca

SEQ ID NO: 15785 - DNA, 20 bp, Artificial Sequence
  Description of Artificial Sequence: Synthetic oligonucleotide
  Target: ANGPTL4; (-) strand; PAM type: YTN; PAM sequence: TTT
attgcaaagagcaaaagaac

SEQ ID NO: 15786 - DNA, 20 bp, Artificial Sequence
  Description of Artificial Sequence: Synthetic oligonucleotide
  Target: ANGPTL4; (-) strand; PAM type: YTN; PAM sequence: CTC
ataaaagcagtggggaccca

SEQ ID NO: 15787 - DNA, 20 bp, Artificial Sequence
  Description of Artificial Sequence: Synthetic oligonucleotide
  Target: ANGPTL4; (-) strand; PAM type: YTN; PAM sequence: TTA
cagctcataaaagcagtggg

SEQ ID NO: 15788 - DNA, 20 bp, Artificial Sequence
  Description of Artificial Sequence: Synthetic oligonucleotide
  Target: ANGPTL4; (-) strand; PAM type: YTN; PAM sequence: TTC
gcagtgagtgttacagctca

SEQ ID NO: 15789 - DNA, 20 bp, Artificial Sequence
  Description of Artificial Sequence: Synthetic oligonucleotide
  Target: ANGPTL4; (-) strand; PAM type: YTN; PAM sequence: CTT
cgcagtgagtgttacagctc

SEQ ID NO: 15790 - DNA, 20 bp, Artificial Sequence
  Description of Artificial Sequence: Synthetic oligonucleotide
  Target: ANGPTL4; (-) strand; PAM type: YTN; PAM sequence: CTG
cagaccttcgcagtgagtgt

SEQ ID NO: 15791 - DNA, 20 bp, Artificial Sequence
  Description of Artificial Sequence: Synthetic oligonucleotide
  Target: ANGPTL4; (-) strand; PAM type: YTN; PAM sequence: CTC
aggagtgaagctgcagacct

SEQ ID NO: 15792 - DNA, 20 bp, Artificial Sequence
  Description of Artificial Sequence: Synthetic oligonucleotide
  Target: ANGPTL4; (-) strand; PAM type: YTN; PAM sequence: CTG
gctcaggagtgaagctgcag

SEQ ID NO: 15793 - DNA, 20 bp, Artificial Sequence
  Description of Artificial Sequence: Synthetic oligonucleotide
  Target: ANGPTL4; (-) strand; PAM type: YTN; PAM sequence: TTC
actggctcaggagtgaagct

SEQ ID NO: 15794 - DNA, 20 bp, Artificial Sequence
  Description of Artificial Sequence: Synthetic oligonucleotide
  Target: ANGPTL4; (-) strand; PAM type: YTN; PAM sequence: TTT
cactggctcaggagtgaagc

SEQ ID NO: 15795 - DNA, 20 bp, Artificial Sequence
  Description of Artificial Sequence: Synthetic oligonucleotide
  Target: ANGPTL4; (-) strand; PAM type: YTN; PAM sequence: TTC
atggtttcactggctcagga

SEQ ID NO: 15796 - DNA, 20 bp, Artificial Sequence
  Description of Artificial Sequence: Synthetic oligonucleotide
  Target: ANGPTL4; (-) strand; PAM type: YTN; PAM sequence: CTG
gtgggttcatggtttcactg

SEQ ID NO: 15797 - DNA, 20 bp, Artificial Sequence
  Description of Artificial Sequence: Synthetic oligonucleotide
  Target: ANGPTL4; (-) strand; PAM type: YTN; PAM sequence: TTC
tggtgggttcatggtttcac

SEQ ID NO: 15798 - DNA, 20 bp, Artificial Sequence
  Description of Artificial Sequence: Synthetic oligonucleotide
  Target: ANGPTL4; (-) strand; PAM type: YTN; PAM sequence: CTT
ctggtgggttcatggtttca

SEQ ID NO: 15799 - DNA, 20 bp, Artificial Sequence
  Description of Artificial Sequence: Synthetic oligonucleotide
  Target: ANGPTL4; (-) strand; PAM type: YTN; PAM sequence: TTC
cttctggtgggttcatggtt

SEQ ID NO: 15800 - DNA, 20 bp, Artificial Sequence
  Description of Artificial Sequence: Synthetic oligonucleotide
  Target: ANGPTL4; (-) strand; PAM type: YTN; PAM sequence: CTT
ccttctggtgggttcatggt

SEQ ID NO: 15801 - DNA, 20 bp, Artificial Sequence
  Description of Artificial Sequence: Synthetic oligonucleotide
  Target: ANGPTL4; (-) strand; PAM type: YTN; PAM sequence: TTC
ttccttctggtgggttcatg

SEQ ID NO: 15802 - DNA, 20 bp, Artificial Sequence
  Description of Artificial Sequence: Synthetic oligonucleotide
  Target: ANGPTL4; (-) strand; PAM type: YTN; PAM sequence: TTT
cttccttctggtgggttcat

SEQ ID NO: 15803 - DNA, 20 bp, Artificial Sequence
  Description of Artificial Sequence: Synthetic oligonucleotide
  Target: ANGPTL4; (-) strand; PAM type: YTN; PAM sequence: TTC
agcgtttcttccttctggtg

SEQ ID NO: 15804 - DNA, 20 bp, Artificial Sequence
  Description of Artificial Sequence: Synthetic oligonucleotide
  Target: ANGPTL4; (-) strand; PAM type: YTN; PAM sequence: TTC
aggtgtgttcagcgtttctt

SEQ ID NO: 15805 - DNA, 20 bp, Artificial Sequence
  Description of Artificial Sequence: Synthetic oligonucleotide
  Target: ANGPTL4; (-) strand; PAM type: YTN; PAM sequence: CTG
atgttcaggtgtgttcagcg

SEQ ID NO: 15806 - DNA, 20 bp, Artificial Sequence
  Description of Artificial Sequence: Synthetic oligonucleotide
  Target: ANGPTL4; (-) strand; PAM type: YTN; PAM sequence: TTC
tgatgttcaggtgtgttcag

SEQ ID NO: 15807 - DNA, 20 bp, Artificial Sequence
  Description of Artificial Sequence: Synthetic oligonucleotide
  Target: ANGPTL4; (-) strand; PAM type: YTN; PAM sequence: CTT
ctgatgttcaggtgtgttca

SEQ ID NO: 15808 - DNA, 20 bp, Artificial Sequence
  Description of Artificial Sequence: Synthetic oligonucleotide
  Target: ANGPTL4; (-) strand; PAM type: YTN; PAM sequence: TTC
ttctgatgttcaggtgtgtt

SEQ ID NO: 15809 - DNA, 20 bp, Artificial Sequence
  Description of Artificial Sequence: Synthetic oligonucleotide
  Target: ANGPTL4; (-) strand; PAM type: YTN; PAM sequence: TTT
cttctgatgttcaggtgtgt

SEQ ID NO: 15810 - DNA, 20 bp, Artificial Sequence
  Description of Artificial Sequence: Synthetic oligonucleotide
  Target: ANGPTL4; (-) strand; PAM type: YTN; PAM sequence: TTG
tttcttctgatgttcaggtg

SEQ ID NO: 15811 - DNA, 20 bp, Artificial Sequence
  Description of Artificial Sequence: Synthetic oligonucleotide
  Target: ANGPTL4; (-) strand; PAM type: YTN; PAM sequence: TTT
gtttcttctgatgttcaggt

SEQ ID NO: 15812 - DNA, 20 bp, Artificial Sequence
  Description of Artificial Sequence: Synthetic oligonucleotide
  Target: ANGPTL4; (-) strand; PAM type: YTN; PAM sequence: CTG
gagtttgtttcttctgatgt

SEQ ID NO: 15813 - DNA, 20 bp, Artificial Sequence
  Description of Artificial Sequence: Synthetic oligonucleotide
  Target: ANGPTL4; (-) strand; PAM type: YTN; PAM sequence: TTA
aggtggcgcgtctggagttt

SEQ ID NO: 15814 - DNA, 20 bp, Artificial Sequence
  Description of Artificial Sequence: Synthetic oligonucleotide
  Target: ANGPTL4; (-) strand; PAM type: YTN; PAM sequence: CTT
aaggtggcgcgtctggagtt

SEQ ID NO: 15815 - DNA, 20 bp, Artificial Sequence
  Description of Artificial Sequence: Synthetic oligonucleotide
  Target: ANGPTL4; (-) strand; PAM type: YTN; PAM sequence: CTC
ttaaggtggcgcgtctggag

SEQ ID NO: 15816 - DNA, 20 bp, Artificial Sequence
  Description of Artificial Sequence: Synthetic oligonucleotide
  Target: ANGPTL4; (-) strand; PAM type: YTN; PAM sequence: TTC
cagctcttaaggtggcgcgt

SEQ ID NO: 15817 - DNA, 20 bp, Artificial Sequence
  Description of Artificial Sequence: Synthetic oligonucleotide
  Target: ANGPTL4; (-) strand; PAM type: YTN; PAM sequence: TTG
cggtaagtgttccagctctt

SEQ ID NO: 15818 - DNA, 20 bp, Artificial Sequence
  Description of Artificial Sequence: Synthetic oligonucleotide
  Target: ANGPTL4; (-) strand; PAM type: YTN; PAM sequence: CTT
gcggtaagtgttccagctct

SEQ ID NO: 15819 - DNA, 20 bp, Artificial Sequence
  Description of Artificial Sequence: Synthetic oligonucleotide
  Target: ANGPTL4; (-) strand; PAM type: YTN; PAM sequence: TTC
aagaatgaagccatggaccc

SEQ ID NO: 15820 - DNA, 20 bp, Artificial Sequence
  Description of Artificial Sequence: Synthetic oligonucleotide
  Target: ANGPTL4; (-) strand; PAM type: YTN; PAM sequence: CTT
caagaatgaagccatggacc

SEQ ID NO: 15821 - DNA, 20 bp, Artificial Sequence
  Description of Artificial Sequence: Synthetic oligonucleotide
  Target: ANGPTL4; (-) strand; PAM type: YTN; PAM sequence: CTG
acttcaagaatgaagccatg

SEQ ID NO: 15822 - DNA, 20 bp, Artificial Sequence
  Description of Artificial Sequence: Synthetic oligonucleotide
  Target: ANGPTL4; (-) strand; PAM type: YTN; PAM sequence: CTC
actgacttcaagaatgaagc

SEQ ID NO: 15823 - DNA, 20 bp, Artificial Sequence
  Description of Artificial Sequence: Synthetic oligonucleotide
  Target: ANGPTL4; (-) strand; PAM type: YTN; PAM sequence: TTG
gtctcactgacttcaagaat

SEQ ID NO: 15824 - DNA, 20 bp, Artificial Sequence
  Description of Artificial Sequence: Synthetic oligonucleotide
  Target: ANGPTL4; (-) strand; PAM type: YTN; PAM sequence: CTT
ggtctcactgacttcaagaa

SEQ ID NO: 15825 - DNA, 20 bp, Artificial Sequence
  Description of Artificial Sequence: Synthetic oligonucleotide
  Target: ANGPTL4; (-) strand; PAM type: YTN; PAM sequence: TTC
ttggtctcactgacttcaag

SEQ ID NO: 15826 - DNA, 20 bp, Artificial Sequence
  Description of Artificial Sequence: Synthetic oligonucleotide
  Target: ANGPTL4; (-) strand; PAM type: YTN; PAM sequence: TTG
gggggttcttggtctcactg

SEQ ID NO: 15827 - DNA, 20 bp, Artificial Sequence
  Description of Artificial Sequence: Synthetic oligonucleotide
  Target: ANGPTL4; (-) strand; PAM type: YTN; PAM sequence: CTG
tatccggaattggggggttc

SEQ ID NO: 15828 - DNA, 20 bp, Artificial Sequence
  Description of Artificial Sequence: Synthetic oligonucleotide
  Target: ANGPTL4; (-) strand; PAM type: YTN; PAM sequence: CTG
gagtgcagtggcactgtatc

SEQ ID NO: 15829 - DNA, 20 bp, Artificial Sequence
  Description of Artificial Sequence: Synthetic oligonucleotide
  Target: ANGPTL4; (-) strand; PAM type: YTN; PAM sequence: CTG
ggctggagtgcagtggcact

SEQ ID NO: 15830 - DNA, 20 bp, Artificial Sequence
  Description of Artificial Sequence: Synthetic oligonucleotide
  Target: ANGPTL4; (-) strand; PAM type: YTN; PAM sequence: TTG
cctgggctggagtgcagtgg

SEQ ID NO: 15831 - DNA, 20 bp, Artificial Sequence
  Description of Artificial Sequence: Synthetic oligonucleotide
  Target: ANGPTL4; (-) strand; PAM type: YTN; PAM sequence: CTG
ttgcctgggctggagtgcag

SEQ ID NO: 15832 - DNA, 20 bp, Artificial Sequence
  Description of Artificial Sequence: Synthetic oligonucleotide
  Target: ANGPTL4; (-) strand; PAM type: YTN; PAM sequence: CTC
tgttgcctgggctggagtgc

SEQ ID NO: 15833 - DNA, 20 bp, Artificial Sequence
  Description of Artificial Sequence: Synthetic oligonucleotide
  Target: ANGPTL4; (-) strand; PAM type: YTN; PAM sequence: CTC
gctctgttgcctgggctgga

SEQ ID NO: 15834 - DNA, 20 bp, Artificial Sequence
  Description of Artificial Sequence: Synthetic oligonucleotide
  Target: ANGPTL4; (-) strand; PAM type: YTN; PAM sequence: TTA
gacagaatctcgctctgttg

SEQ ID NO: 15835 - DNA, 20 bp, Artificial Sequence
  Description of Artificial Sequence: Synthetic oligonucleotide
  Target: ANGPTL4; (-) strand; PAM type: YTN; PAM sequence: TTT
agacagaatctcgctctgtt

SEQ ID NO: 15836 - DNA, 20 bp, Artificial Sequence
  Description of Artificial Sequence: Synthetic oligonucleotide
  Target: ANGPTL4; (-) strand; PAM type: YTN; PAM sequence: TTT
tagacagaatctcgctctgt

SEQ ID NO: 15837 - DNA, 20 bp, Artificial Sequence
  Description of Artificial Sequence: Synthetic oligonucleotide
  Target: ANGPTL4; (-) strand; PAM type: YTN; PAM sequence: TTT
ttagacagaatctcgctctg

SEQ ID NO: 15838 - DNA, 20 bp, Artificial Sequence
  Description of Artificial Sequence: Synthetic oligonucleotide
  Target: ANGPTL4; (-) strand; PAM type: YTN; PAM sequence: TTT
tttagacagaatctcgctct

SEQ ID NO: 15839 - DNA, 20 bp, Artificial Sequence
  Description of Artificial Sequence: Synthetic oligonucleotide
  Target: ANGPTL4; (-) strand; PAM type: YTN; PAM sequence: TTA
ttttttagacagaatctcgc

SEQ ID NO: 15840 - DNA, 20 bp, Artificial Sequence
  Description of Artificial Sequence: Synthetic oligonucleotide
  Target: ANGPTL4; (-) strand; PAM type: YTN; PAM sequence: TTT
attttttagacagaatctcg

SEQ ID NO: 15841 - DNA, 20 bp, Artificial Sequence
  Description of Artificial Sequence: Synthetic oligonucleotide
  Target: ANGPTL4; (-) strand; PAM type: YTN; PAM sequence: TTA
tttattttttagacagaatc

SEQ ID NO: 15842 - DNA, 20 bp, Artificial Sequence
  Description of Artificial Sequence: Synthetic oligonucleotide
  Target: ANGPTL4; (-) strand; PAM type: YTN; PAM sequence: TTT
atttattttttagacagaat

SEQ ID NO: 15843 - DNA, 20 bp, Artificial Sequence
  Description of Artificial Sequence: Synthetic oligonucleotide
  Target: ANGPTL4; (-) strand; PAM type: YTN; PAM sequence: TTA
tttatttattttttagacag

SEQ ID NO: 15844 - DNA, 20 bp, Artificial Sequence
  Description of Artificial Sequence: Synthetic oligonucleotide
  Target: ANGPTL4; (-) strand; PAM type: YTN; PAM sequence: TTT
atttatttattttttagaca

SEQ ID NO: 15845 - DNA, 20 bp, Artificial Sequence
  Description of Artificial Sequence: Synthetic oligonucleotide
  Target: ANGPTL4; (-) strand; PAM type: YTN; PAM sequence: TTC
atatttatttatttattttt

SEQ ID NO: 15846 - DNA, 20 bp, Artificial Sequence
  Description of Artificial Sequence: Synthetic oligonucleotide
  Target: ANGPTL4; (-) strand; PAM type: YTN; PAM sequence: TTT
catatttatttatttatttt

SEQ ID NO: 15847 - DNA, 20 bp, Artificial Sequence
  Description of Artificial Sequence: Synthetic oligonucleotide
  Target: ANGPTL4; (-) strand; PAM type: YTN; PAM sequence: TTA
tttcatatttatttatttat

SEQ ID NO: 15848 - DNA, 20 bp, Artificial Sequence
  Description of Artificial Sequence: Synthetic oligonucleotide
  Target: ANGPTL4; (-) strand; PAM type: YTN; PAM sequence: TTT
atttcatatttatttattta

SEQ ID NO: 15849 - DNA, 20 bp, Artificial Sequence
  Description of Artificial Sequence: Synthetic oligonucleotide
  Target: ANGPTL4; (-) strand; PAM type: YTN; PAM sequence: TTT
tatttcatatttatttattt

SEQ ID NO: 15850 - DNA, 20 bp, Artificial Sequence
  Description of Artificial Sequence: Synthetic oligonucleotide
  Target: ANGPTL4; (-) strand; PAM type: YTN; PAM sequence: TTA
ttttatttcatatttattta

SEQ ID NO: 15851 - DNA, 20 bp, Artificial Sequence
  Description of Artificial Sequence: Synthetic oligonucleotide
  Target: ANGPTL4; (-) strand; PAM type: YTN; PAM sequence: TTT
attttatttcatatttattt

SEQ ID NO: 15852 - DNA, 20 bp, Artificial Sequence
  Description of Artificial Sequence: Synthetic oligonucleotide
  Target: ANGPTL4; (-) strand; PAM type: YTN; PAM sequence: TTT
tattttatttcatatttatt

SEQ ID NO: 15853 - DNA, 20 bp, Artificial Sequence
  Description of Artificial Sequence: Synthetic oligonucleotide
  Target: ANGPTL4; (-) strand; PAM type: YTN; PAM sequence: TTT
ttattttatttcatatttat

SEQ ID NO: 15854 - DNA, 20 bp, Artificial Sequence
  Description of Artificial Sequence: Synthetic oligonucleotide
  Target: ANGPTL4; (-) strand; PAM type: YTN; PAM sequence: TTA
caatttttattttatttcat

SEQ ID NO: 15855 - DNA, 20 bp, Artificial Sequence
  Description of Artificial Sequence: Synthetic oligonucleotide
  Target: ANGPTL4; (-) strand; PAM type: YTN; PAM sequence: TTA
ttacaatttttattttattt

SEQ ID NO: 15856 - DNA, 20 bp, Artificial Sequence
  Description of Artificial Sequence: Synthetic oligonucleotide
  Target: ANGPTL4; (-) strand; PAM type: YTN; PAM sequence: CTA
gatgtagggtatccaattat

SEQ ID NO: 15857 - DNA, 20 bp, Artificial Sequence
  Description of Artificial Sequence: Synthetic oligonucleotide
  Target: ANGPTL4; (-) strand; PAM type: YTN; PAM sequence: CTC
aaatacatgtcctagatgta

SEQ ID NO: 15858 - DNA, 20 bp, Artificial Sequence
  Description of Artificial Sequence: Synthetic oligonucleotide
  Target: ANGPTL4; (-) strand; PAM type: YTN; PAM sequence: TTC
ctcaaatacatgtcctagat

SEQ ID NO: 15859 - DNA, 20 bp, Artificial Sequence
  Description of Artificial Sequence: Synthetic oligonucleotide
  Target: ANGPTL4; (-) strand; PAM type: YTN; PAM sequence: TTT
cctcaaatacatgtcctaga

SEQ ID NO: 15860 - DNA, 20 bp, Artificial Sequence
  Description of Artificial Sequence: Synthetic oligonucleotide
  Target: ANGPTL4; (-) strand; PAM type: YTN; PAM sequence: TTT
tcctcaaatacatgtcctag

SEQ ID NO: 15861 - DNA, 20 bp, Artificial Sequence
  Description of Artificial Sequence: Synthetic oligonucleotide
  Target: ANGPTL4; (-) strand; PAM type: YTN; PAM sequence: TTC
agaaaatggacagatgtggt

SEQ ID NO: 15862 - DNA, 20 bp, Artificial Sequence
  Description of Artificial Sequence: Synthetic oligonucleotide
  Target: ANGPTL4; (-) strand; PAM type: YTN; PAM sequence: CTG
gggttcagaaaatggacaga

SEQ ID NO: 15863 - DNA, 20 bp, Artificial Sequence
  Description of Artificial Sequence: Synthetic oligonucleotide
  Target: ANGPTL4; (-) strand; PAM type: YTN; PAM sequence: TTA
acagcagctggggttcagaa

SEQ ID NO: 15864 - DNA, 20 bp, Artificial Sequence
  Description of Artificial Sequence: Synthetic oligonucleotide
  Target: ANGPTL4; (-) strand; PAM type: YTN; PAM sequence: CTC
ggaaaaaaaaaaaaaaaaaa

SEQ ID NO: 15865 - DNA, 20 bp, Artificial Sequence
  Description of Artificial Sequence: Synthetic oligonucleotide
  Target: ANGPTL4; (-) strand; PAM type: YTN; PAM sequence: TTG
tctcggaaaaaaaaaaaaaa

SEQ ID NO: 15866 - DNA, 20 bp, Artificial Sequence
  Description of Artificial Sequence: Synthetic oligonucleotide
  Target: ANGPTL4; (-) strand; PAM type: YTN; PAM sequence: CTT
gtctcggaaaaaaaaaaaaa

SEQ ID NO: 15867 - DNA, 20 bp, Artificial Sequence
  Description of Artificial Sequence: Synthetic oligonucleotide
  Target: ANGPTL4; (-) strand; PAM type: YTN; PAM sequence: CTC
ttgtctcggaaaaaaaaaaa

SEQ ID NO: 15868 - DNA, 20 bp, Artificial Sequence
  Description of Artificial Sequence: Synthetic oligonucleotide
  Target: ANGPTL4; (-) strand; PAM type: YTN; PAM sequence: CTG
ggtgacagagtgagactctt

SEQ ID NO: 15869 - DNA, 20 bp, Artificial Sequence
  Description of Artificial Sequence: Synthetic oligonucleotide
  Target: ANGPTL4; (-) strand; PAM type: YTN; PAM sequence: CTC
cagcctgggtgacagagtga

SEQ ID NO: 15870 - DNA, 20 bp, Artificial Sequence
  Description of Artificial Sequence: Synthetic oligonucleotide
  Target: ANGPTL4; (-) strand; PAM type: YTN; PAM sequence: CTA
ccgcgctccagcctgggtga

SEQ ID NO: 15871 - DNA, 20 bp, Artificial Sequence
  Description of Artificial Sequence: Synthetic oligonucleotide
  Target: ANGPTL4; (-) strand; PAM type: YTN; PAM sequence: CTG
agatcgcactaccgcgctcc

SEQ ID NO: 15872 - DNA, 20 bp, Artificial Sequence
  Description of Artificial Sequence: Synthetic oligonucleotide
  Target: ANGPTL4; (-) strand; PAM type: YTN; PAM sequence: TTG
cagtaagctgagatcgcact

SEQ ID NO: 15873 - DNA, 20 bp, Artificial Sequence
  Description of Artificial Sequence: Synthetic oligonucleotide
  Target: ANGPTL4; (-) strand; PAM type: YTN; PAM sequence: TTG
aacccgggaggtggaggttg

SEQ ID NO: 15874 - DNA, 20 bp, Artificial Sequence
  Description of Artificial Sequence: Synthetic oligonucleotide
  Target: ANGPTL4; (-) strand; PAM type: YTN; PAM sequence: CTT
gaacccgggaggtggaggtt

SEQ ID NO: 15875 - DNA, 20 bp, Artificial Sequence
  Description of Artificial Sequence: Synthetic oligonucleotide
  Target: ANGPTL4; (-) strand; PAM type: YTN; PAM sequence: CTC
gggaggccgaggcaggagaa

SEQ ID NO: 15876 - DNA, 20 bp, Artificial Sequence
  Description of Artificial Sequence: Synthetic oligonucleotide
  Target: ANGPTL4; (-) strand; PAM type: YTN; PAM sequence: CTA
ctcgggaggccgaggcagga

SEQ ID NO: 15877 - DNA, 20 bp, Artificial Sequence
  Description of Artificial Sequence: Synthetic oligonucleotide
  Target: ANGPTL4; (-) strand; PAM type: YTN; PAM sequence: CTC
agctactcgggaggccgagg

SEQ ID NO: 15878 - DNA, 20 bp, Artificial Sequence
  Description of Artificial Sequence: Synthetic oligonucleotide
  Target: ANGPTL4; (-) strand; PAM type: YTN; PAM sequence: CTG
taatctcagctactcgggag

SEQ ID NO: 15879 - DNA, 20 bp, Artificial Sequence
  Description of Artificial Sequence: Synthetic oligonucleotide
  Target: ANGPTL4; (-) strand; PAM type: YTN; PAM sequence: CTG
ggtgcagtgggaggcgcctg

SEQ ID NO: 15880 - DNA, 20 bp, Artificial Sequence
  Description of Artificial Sequence: Synthetic oligonucleotide
  Target: ANGPTL4; (-) strand; PAM type: YTN; PAM sequence: TTA
gctgggtgcagtgggaggcg

SEQ ID NO: 15881 - DNA, 20 bp, Artificial Sequence
  Description of Artificial Sequence: Synthetic oligonucleotide
  Target: ANGPTL4; (-) strand; PAM type: YTN; PAM sequence: CTA
aaaatacaaaaattagctgg

SEQ ID NO: 15882 - DNA, 20 bp, Artificial Sequence
  Description of Artificial Sequence: Synthetic oligonucleotide
  Target: ANGPTL4; (-) strand; PAM type: YTN; PAM sequence: CTA
tactaaaaatacaaaaatta

SEQ ID NO: 15883 - DNA, 20 bp, Artificial Sequence
  Description of Artificial Sequence: Synthetic oligonucleotide
  Target: ANGPTL4; (-) strand; PAM type: YTN; PAM sequence: CTG
gccaaacccatctatactaa

SEQ ID NO: 15884 - DNA, 20 bp, Artificial Sequence
  Description of Artificial Sequence: Synthetic oligonucleotide
  Target: ANGPTL4; (-) strand; PAM type: YTN; PAM sequence: TTG
agaccagcctggccaaaccc

SEQ ID NO: 15885 - DNA, 20 bp, Artificial Sequence
  Description of Artificial Sequence: Synthetic oligonucleotide
  Target: ANGPTL4; (-) strand; PAM type: YTN; PAM sequence: TTT
gagaccagcctggccaaacc

SEQ ID NO: 15886 - DNA, 20 bp, Artificial Sequence
  Description of Artificial Sequence: Synthetic oligonucleotide
  Target: ANGPTL4; (-) strand; PAM type: YTN; PAM sequence: TTG
aggtcaggagtttgagacca

SEQ ID NO: 15887 - DNA, 20 bp, Artificial Sequence
  Description of Artificial Sequence: Synthetic oligonucleotide
  Target: ANGPTL4; (-) strand; PAM type: YTN; PAM sequence: CTT
gaggtcaggagtttgagacc

SEQ ID NO: 15888 - DNA, 20 bp, Artificial Sequence
  Description of Artificial Sequence: Synthetic oligonucleotide
  Target: ANGPTL4; (-) strand; PAM type: YTN; PAM sequence: TTC
ggaggccgaggcgggcagat

SEQ ID NO: 15889 - DNA, 20 bp, Artificial Sequence
  Description of Artificial Sequence: Synthetic oligonucleotide
  Target: ANGPTL4; (-) strand; PAM type: YTN; PAM sequence: TTT
cggaggccgaggcgggcaga

SEQ ID NO: 15890 - DNA, 20 bp, Artificial Sequence
  Description of Artificial Sequence: Synthetic oligonucleotide
  Target: ANGPTL4; (-) strand; PAM type: YTN; PAM sequence: CTG
taatcccaccagtttcggag

SEQ ID NO: 15891 - DNA, 20 bp, Artificial Sequence
  Description of Artificial Sequence: Synthetic oligonucleotide
  Target: ANGPTL4; (-) strand; PAM type: YTN; PAM sequence: TTG
cgcctgtaatcccaccagtt

SEQ ID NO: 15892 - DNA, 20 bp, Artificial Sequence
  Description of Artificial Sequence: Synthetic oligonucleotide
  Target: ANGPTL4; (-) strand; PAM type: YTN; PAM sequence: CTT
gcgcctgtaatcccaccagt

SEQ ID NO: 15893 - DNA, 20 bp, Artificial Sequence
  Description of Artificial Sequence: Synthetic oligonucleotide
  Target: ANGPTL4; (-) strand; PAM type: YTN; PAM sequence: TTA
acaggccgggcacagtggct

SEQ ID NO: 15894 - DNA, 20 bp, Artificial Sequence
  Description of Artificial Sequence: Synthetic oligonucleotide
  Target: ANGPTL4; (-) strand; PAM type: YTN; PAM sequence: CTG
gggcaaaaataaattaacag

SEQ ID NO: 15895 - DNA, 20 bp, Artificial Sequence
  Description of Artificial Sequence: Synthetic oligonucleotide
  Target: ANGPTL4; (-) strand; PAM type: YTN; PAM sequence: TTG
gagggagatactggggcaaa

SEQ ID NO: 15896 - DNA, 20 bp, Artificial Sequence
  Description of Artificial Sequence: Synthetic oligonucleotide
  Target: ANGPTL4; (-) strand; PAM type: YTN; PAM sequence: TTT
ggagggagatactggggcaa

SEQ ID NO: 15897 - DNA, 20 bp, Artificial Sequence
  Description of Artificial Sequence: Synthetic oligonucleotide
  Target: ANGPTL4; (-) strand; PAM type: YTN; PAM sequence: CTA
taaggaatatttggagggag

SEQ ID NO: 15898 - DNA, 20 bp, Artificial Sequence
  Description of Artificial Sequence: Synthetic oligonucleotide
  Target: ANGPTL4; (-) strand; PAM type: YTN; PAM sequence: CTC
cccaagagacatctataagg

SEQ ID NO: 15899 - DNA, 20 bp, Artificial Sequence
  Description of Artificial Sequence: Synthetic oligonucleotide
  Target: ANGPTL4; (-) strand; PAM type: YTN; PAM sequence: CTA
gcgcaagaacccccaccacc

SEQ ID NO: 15900 - DNA, 20 bp, Artificial Sequence
  Description of Artificial Sequence: Synthetic oligonucleotide
  Target: ANGPTL4; (-) strand; PAM type: YTN; PAM sequence: TTC
tagcgcaagaacccccacca

SEQ ID NO: 15901 - DNA, 20 bp, Artificial Sequence
  Description of Artificial Sequence: Synthetic oligonucleotide
  Target: ANGPTL4; (-) strand; PAM type: YTN; PAM sequence: CTT
ctagcgcaagaacccccacc

SEQ ID NO: 15902 - DNA, 20 bp, Artificial Sequence
  Description of Artificial Sequence: Synthetic oligonucleotide
  Target: ANGPTL4; (-) strand; PAM type: YTN; PAM sequence: TTC
ttctagcgcaagaaccccca

SEQ ID NO: 15903 - DNA, 20 bp, Artificial Sequence
  Description of Artificial Sequence: Synthetic oligonucleotide
  Target: ANGPTL4; (-) strand; PAM type: YTN; PAM sequence: TTT
cttctagcgcaagaaccccc

SEQ ID NO: 15904 - DNA, 20 bp, Artificial Sequence
  Description of Artificial Sequence: Synthetic oligonucleotide
  Target: ANGPTL4; (-) strand; PAM type: YTN; PAM sequence: TTT
tcttctagcgcaagaacccc

SEQ ID NO: 15905 - DNA, 20 bp, Artificial Sequence
  Description of Artificial Sequence: Synthetic oligonucleotide
  Target: ANGPTL4; (-) strand; PAM type: YTN; PAM sequence: TTT
ttcttctagcgcaagaaccc

SEQ ID NO: 15906 - DNA, 20 bp, Artificial Sequence
  Description of Artificial Sequence: Synthetic oligonucleotide
  Target: ANGPTL4; (-) strand; PAM type: YTN; PAM sequence: TTT
tttcttctagcgcaagaacc

SEQ ID NO: 15907 - DNA, 20 bp, Artificial Sequence
  Description of Artificial Sequence: Synthetic oligonucleotide
  Target: ANGPTL4; (-) strand; PAM type: YTN; PAM sequence: CTG
ccaggaagggtcaagacaag

SEQ ID NO: 15908 - DNA, 20 bp, Artificial Sequence
  Description of Artificial Sequence: Synthetic oligonucleotide
  Target: ANGPTL4; (-) strand; PAM type: YTN; PAM sequence: CTG
tgtccccagcacctgccagg

SEQ ID NO: 15909 - DNA, 20 bp, Artificial Sequence
  Description of Artificial Sequence: Synthetic oligonucleotide
  Target: ANGPTL4; (-) strand; PAM type: YTN; PAM sequence: CTA
tacccagccacagccccagg

SEQ ID NO: 15910 - DNA, 20 bp, Artificial Sequence
  Description of Artificial Sequence: Synthetic oligonucleotide
  Target: ANGPTL4; (-) strand; PAM type: YTN; PAM sequence: TTG
tcacctatacccagccacag

SEQ ID NO: 15911 - DNA, 20 bp, Artificial Sequence
  Description of Artificial Sequence: Synthetic oligonucleotide
  Target: ANGPTL4; (-) strand; PAM type: YTN; PAM sequence: TTT
gtcacctatacccagccaca

SEQ ID NO: 15912 - DNA, 20 bp, Artificial Sequence
  Description of Artificial Sequence: Synthetic oligonucleotide
  Target: ANGPTL4; (-) strand; PAM type: YTN; PAM sequence: CTA
aaaagtttgtcacctatacc

SEQ ID NO: 15913 - DNA, 20 bp, Artificial Sequence
  Description of Artificial Sequence: Synthetic oligonucleotide
  Target: ANGPTL4; (-) strand; PAM type: YTN; PAM sequence: CTA
caaagctaaaaagtttgtca

SEQ ID NO: 15914 - DNA, 20 bp, Artificial Sequence
  Description of Artificial Sequence: Synthetic oligonucleotide
  Target: ANGPTL4; (-) strand; PAM type: YTN; PAM sequence: CTC
tacaaagctaaaaagtttgt

SEQ ID NO: 15915 - DNA, 20 bp, Artificial Sequence
  Description of Artificial Sequence: Synthetic oligonucleotide
  Target: ANGPTL4; (-) strand; PAM type: YTN; PAM sequence: CTA
cctctacaaagctaaaaagt

SEQ ID NO: 15916 - DNA, 20 bp, Artificial Sequence
  Description of Artificial Sequence: Synthetic oligonucleotide
  Target: ANGPTL4; (-) strand; PAM type: YTN; PAM sequence: CTG
taggacctacctctacaaag

SEQ ID NO: 15917 - DNA, 20 bp, Artificial Sequence
  Description of Artificial Sequence: Synthetic oligonucleotide
  Target: ANGPTL4; (-) strand; PAM type: YTN; PAM sequence: CTG
gcagctgtaggacctacctc

SEQ ID NO: 15918 - DNA, 20 bp, Artificial Sequence
  Description of Artificial Sequence: Synthetic oligonucleotide
  Target: ANGPTL4; (-) strand; PAM type: YTN; PAM sequence: CTG
gcctggcagctgtaggacct

SEQ ID NO: 15919 - DNA, 20 bp, Artificial Sequence
  Description of Artificial Sequence: Synthetic oligonucleotide
  Target: ANGPTL4; (-) strand; PAM type: YTN; PAM sequence: CTC
cctggcctggcagctgtagg

SEQ ID NO: 15920 - DNA, 20 bp, Artificial Sequence
  Description of Artificial Sequence: Synthetic oligonucleotide
  Target: ANGPTL4; (-) strand; PAM type: YTN; PAM sequence: CTA
gcctccctggcctggcagct

SEQ ID NO: 15921 - DNA, 20 bp, Artificial Sequence
  Description of Artificial Sequence: Synthetic oligonucleotide
  Target: ANGPTL4; (-) strand; PAM type: YTN; PAM sequence: CTC
tagcctccctggcctggcag

SEQ ID NO: 15922 - DNA, 20 bp, Artificial Sequence
  Description of Artificial Sequence: Synthetic oligonucleotide
  Target: ANGPTL4; (-) strand; PAM type: YTN; PAM sequence: CTG
gagagggcagcctctagcct

SEQ ID NO: 15923 - DNA, 20 bp, Artificial Sequence
  Description of Artificial Sequence: Synthetic oligonucleotide
  Target: ANGPTL4; (-) strand; PAM type: YTN; PAM sequence: CTC
agtacaggacacaggcaaac

SEQ ID NO: 15924 - DNA, 20 bp, Artificial Sequence
  Description of Artificial Sequence: Synthetic oligonucleotide
  Target: ANGPTL4; (-) strand; PAM type: YTN; PAM sequence: CTG
ctcagtacaggacacaggca

SEQ ID NO: 15925 - DNA, 20 bp, Artificial Sequence
  Description of Artificial Sequence: Synthetic oligonucleotide
  Target: ANGPTL4; (-) strand; PAM type: YTN; PAM sequence: CTA
agcctgctcagtacaggaca

SEQ ID NO: 15926 - DNA, 20 bp, Artificial Sequence
  Description of Artificial Sequence: Synthetic oligonucleotide
  Target: ANGPTL4; (-) strand; PAM type: YTN; PAM sequence: CTC
taagcctgctcagtacagga

SEQ ID NO: 15927 - DNA, 20 bp, Artificial Sequence
  Description of Artificial Sequence: Synthetic oligonucleotide
  Target: ANGPTL4; (-) strand; PAM type: YTN; PAM sequence: CTC
agaggagatcctctaagcct

SEQ ID NO: 15928 - DNA, 20 bp, Artificial Sequence
  Description of Artificial Sequence: Synthetic oligonucleotide
  Target: ANGPTL4; (-) strand; PAM type: YTN; PAM sequence: CTC
cagtgacagtgggctcagag

SEQ ID NO: 15929 - DNA, 20 bp, Artificial Sequence
  Description of Artificial Sequence: Synthetic oligonucleotide
  Target: ANGPTL4; (-) strand; PAM type: YTN; PAM sequence: CTC
accaccagctccagtgacag

SEQ ID NO: 15930 - DNA, 20 bp, Artificial Sequence
  Description of Artificial Sequence: Synthetic oligonucleotide
  Target: ANGPTL4; (-) strand; PAM type: YTN; PAM sequence: CTG
gactcaccaccagctccagt

SEQ ID NO: 15931 - DNA, 20 bp, Artificial Sequence
  Description of Artificial Sequence: Synthetic oligonucleotide
  Target: ANGPTL4; (-) strand; PAM type: YTN; PAM sequence: CTG
cagactggactcaccaccag

SEQ ID NO: 15932 - DNA, 20 bp, Artificial Sequence
  Description of Artificial Sequence: Synthetic oligonucleotide
  Target: ANGPTL4; (-) strand; PAM type: YTN; PAM sequence: CTC
ctgcagactggactcaccac

SEQ ID NO: 15933 - DNA, 20 bp, Artificial Sequence
  Description of Artificial Sequence: Synthetic oligonucleotide
  Target: ANGPTL4; (-) strand; PAM type: YTN; PAM sequence: CTC
tcctgcagactggactcacc

SEQ ID NO: 15934 - DNA, 20 bp, Artificial Sequence
  Description of Artificial Sequence: Synthetic oligonucleotide
  Target: ANGPTL4; (-) strand; PAM type: YTN; PAM sequence: CTA
gaggaaccccctctcctgca

SEQ ID NO: 15935 - DNA, 20 bp, Artificial Sequence
  Description of Artificial Sequence: Synthetic oligonucleotide
  Target: ANGPTL4; (-) strand; PAM type: YTN; PAM sequence: CTG
gaaatgaagagggtgtggct

SEQ ID NO: 15936 - DNA, 20 bp, Artificial Sequence
  Description of Artificial Sequence: Synthetic oligonucleotide
  Target: ANGPTL4; (-) strand; PAM type: YTN; PAM sequence: TTG
gcagagcctggaaatgaaga

SEQ ID NO: 15937 - DNA, 20 bp, Artificial Sequence
  Description of Artificial Sequence: Synthetic oligonucleotide
  Target: ANGPTL4; (-) strand; PAM type: YTN; PAM sequence: TTG
aagagatgagcccatcattg

SEQ ID NO: 15938 - DNA, 20 bp, Artificial Sequence
  Description of Artificial Sequence: Synthetic oligonucleotide
  Target: ANGPTL4; (-) strand; PAM type: YTN; PAM sequence: CTG
caggaaaaaggatgacattg

SEQ ID NO: 15939 - DNA, 20 bp, Artificial Sequence
  Description of Artificial Sequence: Synthetic oligonucleotide
  Target: ANGPTL4; (-) strand; PAM type: YTN; PAM sequence: TTG
aggtcaaggtggctgcagga

SEQ ID NO: 15940 - DNA, 20 bp, Artificial Sequence
  Description of Artificial Sequence: Synthetic oligonucleotide
  Target: ANGPTL4; (-) strand; PAM type: YTN; PAM sequence: TTT
gaggtcaaggtggctgcagg

SEQ ID NO: 15941 - DNA, 20 bp, Artificial Sequence
  Description of Artificial Sequence: Synthetic oligonucleotide
  Target: ANGPTL4; (-) strand; PAM type: YTN; PAM sequence: CTT
tgaggtcaaggtggctgcag

SEQ ID NO: 15942 - DNA, 20 bp, Artificial Sequence
  Description of Artificial Sequence: Synthetic oligonucleotide
  Target: ANGPTL4; (-) strand; PAM type: YTN; PAM sequence: TTG
gaggggcaggaaatgctttg

SEQ ID NO: 15943 - DNA, 20 bp, Artificial Sequence
  Description of Artificial Sequence: Synthetic oligonucleotide
  Target: ANGPTL4; (-) strand; PAM type: YTN; PAM sequence: TTC
cccaggttggaggggcagga

SEQ ID NO: 15944 - DNA, 20 bp, Artificial Sequence
  Description of Artificial Sequence: Synthetic oligonucleotide
  Target: ANGPTL4; (-) strand; PAM type: YTN; PAM sequence: CTG
tcgttccccaggttggaggg

SEQ ID NO: 15945 - DNA, 20 bp, Artificial Sequence
  Description of Artificial Sequence: Synthetic oligonucleotide
  Target: ANGPTL4; (-) strand; PAM type: YTN; PAM sequence: TTC
tgtcgttccccaggttggag

SEQ ID NO: 15946 - DNA, 20 bp, Artificial Sequence
  Description of Artificial Sequence: Synthetic oligonucleotide
  Target: ANGPTL4; (-) strand; PAM type: YTN; PAM sequence: TTT
ctgtcgttccccaggttgga

SEQ ID NO: 15947 - DNA, 20 bp, Artificial Sequence
  Description of Artificial Sequence: Synthetic oligonucleotide
  Target: ANGPTL4; (-) strand; PAM type: YTN; PAM sequence: TTT
tctgtcgttccccaggttgg

SEQ ID NO: 15948 - DNA, 20 bp, Artificial Sequence
  Description of Artificial Sequence: Synthetic oligonucleotide
  Target: ANGPTL4; (-) strand; PAM type: YTN; PAM sequence: TTT
ttctgtcgttccccaggttg

SEQ ID NO: 15949 - DNA, 20 bp, Artificial Sequence
  Description of Artificial Sequence: Synthetic oligonucleotide
  Target: ANGPTL4; (-) strand; PAM type: YTN; PAM sequence: TTT
tttctgtcgttccccaggtt

SEQ ID NO: 15950 - DNA, 20 bp, Artificial Sequence
  Description of Artificial Sequence: Synthetic oligonucleotide
  Target: ANGPTL4; (-) strand; PAM type: YTN; PAM sequence: TTT
ttttctgtcgttccccaggt

SEQ ID NO: 15951 - DNA, 20 bp, Artificial Sequence
  Description of Artificial Sequence: Synthetic oligonucleotide
  Target: ANGPTL4; (-) strand; PAM type: YTN; PAM sequence: TTT
tttttctgtcgttccccagg

SEQ ID NO: 15952 - DNA, 20 bp, Artificial Sequence
  Description of Artificial Sequence: Synthetic oligonucleotide
  Target: ANGPTL4; (-) strand; PAM type: YTN; PAM sequence: TTT
ttttttctgtcgttccccag

SEQ ID NO: 15953 - DNA, 20 bp, Artificial Sequence
  Description of Artificial Sequence: Synthetic oligonucleotide
  Target: ANGPTL4; (-) strand; PAM type: YTN; PAM sequence: TTT
tttttttctgtcgttcccca

SEQ ID NO: 15954 - DNA, 20 bp, Artificial Sequence
  Description of Artificial Sequence: Synthetic oligonucleotide
  Target: ANGPTL4; (-) strand; PAM type: YTN; PAM sequence: TTT
ttttttttctgtcgttcccc

SEQ ID NO: 15955 - DNA, 20 bp, Artificial Sequence
  Description of Artificial Sequence: Synthetic oligonucleotide
  Target: ANGPTL4; (-) strand; PAM type: YTN; PAM sequence: TTT
tttttttttctgtcgttccc

SEQ ID NO: 15956 - DNA, 20 bp, Artificial Sequence
  Description of Artificial Sequence: Synthetic oligonucleotide
  Target: ANGPTL4; (-) strand; PAM type: YTN; PAM sequence: TTT
ttttttttttctgtcgttcc

SEQ ID NO: 15957 - DNA, 20 bp, Artificial Sequence
  Description of Artificial Sequence: Synthetic oligonucleotide
  Target: ANGPTL4; (-) strand; PAM type: YTN; PAM sequence: TTT
tttttttttttctgtcgttc

SEQ ID NO: 15958 - DNA, 20 bp, Artificial Sequence
  Description of Artificial Sequence: Synthetic oligonucleotide
  Target: ANGPTL4; (-) strand; PAM type: YTN; PAM sequence: TTT
ttttttttttttctgtcgtt

SEQ ID NO: 15959 - DNA, 20 bp, Artificial Sequence
  Description of Artificial Sequence: Synthetic oligonucleotide
  Target: ANGPTL4; (-) strand; PAM type: YTN; PAM sequence: TTT
tttttttttttttctgtcgt

SEQ ID NO: 15960 - DNA, 20 bp, Artificial Sequence
  Description of Artificial Sequence: Synthetic oligonucleotide
  Target: ANGPTL4; (-) strand; PAM type: YTN; PAM sequence: TTT
ttttttttttttttctgtcg

SEQ ID NO: 15961 - DNA, 20 bp, Artificial Sequence
  Description of Artificial Sequence: Synthetic oligonucleotide
  Target: ANGPTL4; (-) strand; PAM type: YTN; PAM sequence: CTC
ccagagtgcggggagtgtag

SEQ ID NO: 15962 - DNA, 20 bp, Artificial Sequence
  Description of Artificial Sequence: Synthetic oligonucleotide
  Target: ANGPTL4; (-) strand; PAM type: YTN; PAM sequence: CTC
agcctcccagagtgcgggga

SEQ ID NO: 15963 - DNA, 20 bp, Artificial Sequence
  Description of Artificial Sequence: Synthetic oligonucleotide
  Target: ANGPTL4; (-) strand; PAM type: YTN; PAM sequence: CTA
cccacctcagcctcccagag

SEQ ID NO: 15964 - DNA, 20 bp, Artificial Sequence
  Description of Artificial Sequence: Synthetic oligonucleotide
  Target: ANGPTL4; (-) strand; PAM type: YTN; PAM sequence: TTG
tgatctacccacctcagcct

SEQ ID NO: 15965 - DNA, 20 bp, Artificial Sequence
  Description of Artificial Sequence: Synthetic oligonucleotide
  Target: ANGPTL4; (-) strand; PAM type: YTN; PAM sequence: CTT
gtgatctacccacctcagcc

SEQ ID NO: 15966 - DNA, 20 bp, Artificial Sequence
  Description of Artificial Sequence: Synthetic oligonucleotide
  Target: ANGPTL4; (-) strand; PAM type: YTN; PAM sequence: CTG
accttgtgatctacccacct

SEQ ID NO: 15967 - DNA, 20 bp, Artificial Sequence
  Description of Artificial Sequence: Synthetic oligonucleotide
  Target: ANGPTL4; (-) strand; PAM type: YTN; PAM sequence: CTC
ctgaccttgtgatctaccca

SEQ ID NO: 15968 - DNA, 20 bp, Artificial Sequence
  Description of Artificial Sequence: Synthetic oligonucleotide
  Target: ANGPTL4; (-) strand; PAM type: YTN; PAM sequence: TTG
atctcctgaccttgtgatct

SEQ ID NO: 15969 - DNA, 20 bp, Artificial Sequence
  Description of Artificial Sequence: Synthetic oligonucleotide
  Target: ANGPTL4; (-) strand; PAM type: YTN; PAM sequence: CTT
gatctcctgaccttgtgatc

SEQ ID NO: 15970 - DNA, 20 bp, Artificial Sequence
  Description of Artificial Sequence: Synthetic oligonucleotide
  Target: ANGPTL4; (-) strand; PAM type: YTN; PAM sequence: TTC
accgtgtcagccagtatggt

SEQ ID NO: 15971 - DNA, 20 bp, Artificial Sequence
  Description of Artificial Sequence: Synthetic oligonucleotide
  Target: ANGPTL4; (-) strand; PAM type: YTN; PAM sequence: TTT
caccgtgtcagccagtatgg

SEQ ID NO: 15972 - DNA, 20 bp, Artificial Sequence
  Description of Artificial Sequence: Synthetic oligonucleotide
  Target: ANGPTL4; (-) strand; PAM type: YTN; PAM sequence: TTA
gtagagacggggtttcaccg

SEQ ID NO: 15973 - DNA, 20 bp, Artificial Sequence
  Description of Artificial Sequence: Synthetic oligonucleotide
  Target: ANGPTL4; (-) strand; PAM type: YTN; PAM sequence: TTT
agtagagacggggtttcacc

SEQ ID NO: 15974 - DNA, 20 bp, Artificial Sequence
  Description of Artificial Sequence: Synthetic oligonucleotide
  Target: ANGPTL4; (-) strand; PAM type: YTN; PAM sequence: TTT
tagtagagacggggtttcac

SEQ ID NO: 15975 - DNA, 20 bp, Artificial Sequence
  Description of Artificial Sequence: Synthetic oligonucleotide
  Target: ANGPTL4; (-) strand; PAM type: YTN; PAM sequence: TTT
ttagtagagacggggtttca

SEQ ID NO: 15976 - DNA, 20 bp, Artificial Sequence
  Description of Artificial Sequence: Synthetic oligonucleotide
  Target: ANGPTL4; (-) strand; PAM type: YTN; PAM sequence: TTG
tatttttagtagagacgggg

SEQ ID NO: 15977 - DNA, 20 bp, Artificial Sequence
  Description of Artificial Sequence: Synthetic oligonucleotide
  Target: ANGPTL4; (-) strand; PAM type: YTN; PAM sequence: TTT
gtatttttagtagagacggg

SEQ ID NO: 15978 - DNA, 20 bp, Artificial Sequence
  Description of Artificial Sequence: Synthetic oligonucleotide
  Target: ANGPTL4; (-) strand; PAM type: YTN; PAM sequence: TTT
tgtatttttagtagagacgg

SEQ ID NO: 15979 - DNA, 20 bp, Artificial Sequence
  Description of Artificial Sequence: Synthetic oligonucleotide
  Target: ANGPTL4; (-) strand; PAM type: YTN; PAM sequence: TTT
ttgtatttttagtagagacg

SEQ ID NO: 15980 - DNA, 20 bp, Artificial Sequence
  Description of Artificial Sequence: Synthetic oligonucleotide
  Target: ANGPTL4; (-) strand; PAM type: YTN; PAM sequence: TTT
tttgtatttttagtagagac

SEQ ID NO: 15981 - DNA, 20 bp, Artificial Sequence
  Description of Artificial Sequence: Synthetic oligonucleotide
  Target: ANGPTL4; (-) strand; PAM type: YTN; PAM sequence: CTA
attttttgtatttttagtag

SEQ ID NO: 15982 - DNA, 20 bp, Artificial Sequence
  Description of Artificial Sequence: Synthetic oligonucleotide
  Target: ANGPTL4; (-) strand; PAM type: YTN; PAM sequence: CTG
gctaattttttgtattttta

SEQ ID NO: 15983 - DNA, 20 bp, Artificial Sequence
  Description of Artificial Sequence: Synthetic oligonucleotide
  Target: ANGPTL4; (-) strand; PAM type: YTN; PAM sequence: CTA
cgggcatgtgccaccatgcc

SEQ ID NO: 15984 - DNA, 20 bp, Artificial Sequence
  Description of Artificial Sequence: Synthetic oligonucleotide
  Target: ANGPTL4; (-) strand; PAM type: YTN; PAM sequence: CTG
ggactacgggcatgtgccac

SEQ ID NO: 15985 - DNA, 20 bp, Artificial Sequence
  Description of Artificial Sequence: Synthetic oligonucleotide
  Target: ANGPTL4; (-) strand; PAM type: YTN; PAM sequence: CTC
ccgaatagctgggactacgg

SEQ ID NO: 15986 - DNA, 20 bp, Artificial Sequence
  Description of Artificial Sequence: Synthetic oligonucleotide
  Target: ANGPTL4; (-) strand; PAM type: YTN; PAM sequence: TTA
gcctcccgaatagctgggac

SEQ ID NO: 15987 - DNA, 20 bp, Artificial Sequence
  Description of Artificial Sequence: Synthetic oligonucleotide
  Target: ANGPTL4; (-) strand; PAM type: YTN; PAM sequence: CTT
agcctcccgaatagctggga

SEQ ID NO: 15988 - DNA, 20 bp, Artificial Sequence
  Description of Artificial Sequence: Synthetic oligonucleotide
  Target: ANGPTL4; (-) strand; PAM type: YTN; PAM sequence: CTG
ccttagcctcccgaatagct

SEQ ID NO: 15989 - DNA, 20 bp, Artificial Sequence
  Description of Artificial Sequence: Synthetic oligonucleotide
  Target: ANGPTL4; (-) strand; PAM type: YTN; PAM sequence: CTC
ctgccttagcctcccgaata

SEQ ID NO: 15990 - DNA, 20 bp, Artificial Sequence
  Description of Artificial Sequence: Synthetic oligonucleotide
  Target: ANGPTL4; (-) strand; PAM type: YTN; PAM sequence: TTC
tcctgccttagcctcccgaa

SEQ ID NO: 15991 - DNA, 20 bp, Artificial Sequence
  Description of Artificial Sequence: Synthetic oligonucleotide
  Target: ANGPTL4; (-) strand; PAM type: YTN; PAM sequence: TTC
aagtgattctcctgccttag

SEQ ID NO: 15992 - DNA, 20 bp, Artificial Sequence
  Description of Artificial Sequence: Synthetic oligonucleotide
  Target: ANGPTL4; (-) strand; PAM type: YTN; PAM sequence: CTC
ccaggttcaagtgattctcc

SEQ ID NO: 15993 - DNA, 20 bp, Artificial Sequence
  Description of Artificial Sequence: Synthetic oligonucleotide
  Target: ANGPTL4; (-) strand; PAM type: YTN; PAM sequence: CTC
cgcctcccaggttcaagtga

SEQ ID NO: 15994 - DNA, 20 bp, Artificial Sequence
  Description of Artificial Sequence: Synthetic oligonucleotide
  Target: ANGPTL4; (-) strand; PAM type: YTN; PAM sequence: CTG
caacctccgcctcccaggtt

SEQ ID NO: 15995 - DNA, 20 bp, Artificial Sequence
  Description of Artificial Sequence: Synthetic oligonucleotide
  Target: ANGPTL4; (-) strand; PAM type: YTN; PAM sequence: CTC
actgcaacctccgcctccca

SEQ ID NO: 15996 - DNA, 20 bp, Artificial Sequence
  Description of Artificial Sequence: Synthetic oligonucleotide
  Target: ANGPTL4; (-) strand; PAM type: YTN; PAM sequence: CTC
agctcactgcaacctccgcc

SEQ ID NO: 15997 - DNA, 20 bp, Artificial Sequence
  Description of Artificial Sequence: Synthetic oligonucleotide
  Target: ANGPTL4; (-) strand; PAM type: YTN; PAM sequence: CTG
gagtgcagtggtgcaatctc

SEQ ID NO: 15998 - DNA, 20 bp, Artificial Sequence
  Description of Artificial Sequence: Synthetic oligonucleotide
  Target: ANGPTL4; (-) strand; PAM type: YTN; PAM sequence: CTG
tcacccaggctggagtgcag

SEQ ID NO: 15999 - DNA, 20 bp, Artificial Sequence
  Description of Artificial Sequence: Synthetic oligonucleotide
  Target: ANGPTL4; (-) strand; PAM type: YTN; PAM sequence: CTC
tgtcacccaggctggagtgc

SEQ ID NO: 16000 - DNA, 20 bp, Artificial Sequence
  Description of Artificial Sequence: Synthetic oligonucleotide
  Target: ANGPTL4; (-) strand; PAM type: YTN; PAM sequence: TTG
ctctgtcacccaggctggag

SEQ ID NO: 16001 - DNA, 20 bp, Artificial Sequence
  Description of Artificial Sequence: Synthetic oligonucleotide
  Target: ANGPTL4; (-) strand; PAM type: YTN; PAM sequence: CTT
gctctgtcacccaggctgga

SEQ ID NO: 16002 - DNA, 20 bp, Artificial Sequence
  Description of Artificial Sequence: Synthetic oligonucleotide
  Target: ANGPTL4; (-) strand; PAM type: YTN; PAM sequence: TTG
agacagagtcttgctctgtc

SEQ ID NO: 16003 - DNA, 20 bp, Artificial Sequence
  Description of Artificial Sequence: Synthetic oligonucleotide
  Target: ANGPTL4; (-) strand; PAM type: YTN; PAM sequence: TTT
gagacagagtcttgctctgt

SEQ ID NO: 16004 - DNA, 20 bp, Artificial Sequence
  Description of Artificial Sequence: Synthetic oligonucleotide
  Target: ANGPTL4; (-) strand; PAM type: YTN; PAM sequence: TTT
tgagacagagtcttgctctg

SEQ ID NO: 16005 - DNA, 20 bp, Artificial Sequence
  Description of Artificial Sequence: Synthetic oligonucleotide
  Target: ANGPTL4; (-) strand; PAM type: YTN; PAM sequence: TTT
ttgagacagagtcttgctct

SEQ ID NO: 16006 - DNA, 20 bp, Artificial Sequence
  Description of Artificial Sequence: Synthetic oligonucleotide
  Target: ANGPTL4; (-) strand; PAM type: YTN; PAM sequence: TTT
tttgagacagagtcttgctc

SEQ ID NO: 16007 - DNA, 20 bp, Artificial Sequence
  Description of Artificial Sequence: Synthetic oligonucleotide
  Target: ANGPTL4; (-) strand; PAM type: YTN; PAM sequence: CTT
ttttgagacagagtcttgct

SEQ ID NO: 16008 - DNA, 20 bp, Artificial Sequence
  Description of Artificial Sequence: Synthetic oligonucleotide
  Target: ANGPTL4; (-) strand; PAM type: YTN; PAM sequence: TTC
ttttttgagacagagtcttg

SEQ ID NO: 16009 - DNA, 20 bp, Artificial Sequence
  Description of Artificial Sequence: Synthetic oligonucleotide
  Target: ANGPTL4; (-) strand; PAM type: YTN; PAM sequence: TTT
cttttttgagacagagtctt

SEQ ID NO: 16010 - DNA, 20 bp, Artificial Sequence
  Description of Artificial Sequence: Synthetic oligonucleotide
  Target: ANGPTL4; (-) strand; PAM type: YTN; PAM sequence: CTT
tcttttttgagacagagtct

SEQ ID NO: 16011 - DNA, 20 bp, Artificial Sequence
  Description of Artificial Sequence: Synthetic oligonucleotide
  Target: ANGPTL4; (-) strand; PAM type: YTN; PAM sequence: TTC
tttcttttttgagacagagt

SEQ ID NO: 16012 - DNA, 20 bp, Artificial Sequence
  Description of Artificial Sequence: Synthetic oligonucleotide
  Target: ANGPTL4; (-) strand; PAM type: YTN; PAM sequence: TTT
ctttcttttttgagacagag

SEQ ID NO: 16013 - DNA, 20 bp, Artificial Sequence
  Description of Artificial Sequence: Synthetic oligonucleotide
  Target: ANGPTL4; (-) strand; PAM type: YTN; PAM sequence: TTT
tctttcttttttgagacaga

SEQ ID NO: 16014 - DNA, 20 bp, Artificial Sequence
  Description of Artificial Sequence: Synthetic oligonucleotide
  Target: ANGPTL4; (-) strand; PAM type: YTN; PAM sequence: TTT
ttctttcttttttgagacag

SEQ ID NO: 16015 - DNA, 20 bp, Artificial Sequence
  Description of Artificial Sequence: Synthetic oligonucleotide
  Target: ANGPTL4; (-) strand; PAM type: YTN; PAM sequence: TTT
tttctttcttttttgagaca

SEQ ID NO: 16016 - DNA, 20 bp, Artificial Sequence
  Description of Artificial Sequence: Synthetic oligonucleotide
  Target: ANGPTL4; (-) strand; PAM type: YTN; PAM sequence: TTT
ttttctttcttttttgagac

SEQ ID NO: 16017 - DNA, 20 bp, Artificial Sequence
  Description of Artificial Sequence: Synthetic oligonucleotide
  Target: ANGPTL4; (-) strand; PAM type: YTN; PAM sequence: CTT
tttttctttcttttttgaga

SEQ ID NO: 16018 - DNA, 20 bp, Artificial Sequence
  Description of Artificial Sequence: Synthetic oligonucleotide
  Target: ANGPTL4; (-) strand; PAM type: YTN; PAM sequence: TTC
tttttttctttcttttttga

SEQ ID NO: 16019 - DNA, 20 bp, Artificial Sequence
  Description of Artificial Sequence: Synthetic oligonucleotide
  Target: ANGPTL4; (-) strand; PAM type: YTN; PAM sequence: TTT
ctttttttctttcttttttg

SEQ ID NO: 16020 - DNA, 20 bp, Artificial Sequence
  Description of Artificial Sequence: Synthetic oligonucleotide
  Target: ANGPTL4; (-) strand; PAM type: YTN; PAM sequence: CTT
tctttttttctttctttttt

SEQ ID NO: 16021 - DNA, 20 bp, Artificial Sequence
  Description of Artificial Sequence: Synthetic oligonucleotide
  Target: ANGPTL4; (-) strand; PAM type: YTN; PAM sequence: TTC
tttctttttttctttctttt

SEQ ID NO: 16022 - DNA, 20 bp, Artificial Sequence
  Description of Artificial Sequence: Synthetic oligonucleotide
  Target: ANGPTL4; (-) strand; PAM type: YTN; PAM sequence: TTT
ctttctttttttctttcttt

SEQ ID NO: 16023 - DNA, 20 bp, Artificial Sequence
  Description of Artificial Sequence: Synthetic oligonucleotide
  Target: ANGPTL4; (-) strand; PAM type: YTN; PAM sequence: TTT
tctttctttttttctttctt

SEQ ID NO: 16024 - DNA, 20 bp, Artificial Sequence
  Description of Artificial Sequence: Synthetic oligonucleotide
  Target: ANGPTL4; (-) strand; PAM type: YTN; PAM sequence: CTT
ttctttctttttttctttct

SEQ ID NO: 16025 - DNA, 20 bp, Artificial Sequence
  Description of Artificial Sequence: Synthetic oligonucleotide
  Target: ANGPTL4; (-) strand; PAM type: YTN; PAM sequence: TTC
ttttctttctttttttcttt

SEQ ID NO: 16026 - DNA, 20 bp, Artificial Sequence
  Description of Artificial Sequence: Synthetic oligonucleotide
  Target: ANGPTL4; (-) strand; PAM type: YTN; PAM sequence: TTT
cttttctttctttttttctt

SEQ ID NO: 16027 - DNA, 20 bp, Artificial Sequence
  Description of Artificial Sequence: Synthetic oligonucleotide
  Target: ANGPTL4; (-) strand; PAM type: YTN; PAM sequence: TTT
tcttttctttctttttttct

SEQ ID NO: 16028 - DNA, 20 bp, Artificial Sequence
  Description of Artificial Sequence: Synthetic oligonucleotide
  Target: ANGPTL4; (-) strand; PAM type: YTN; PAM sequence: TTT
ttcttttctttctttttttc

SEQ ID NO: 16029 - DNA, 20 bp, Artificial Sequence
  Description of Artificial Sequence: Synthetic oligonucleotide
  Target: ANGPTL4; (-) strand; PAM type: YTN; PAM sequence: CTG
ccatggtgtttttcttttct

SEQ ID NO: 16030 - DNA, 20 bp, Artificial Sequence
  Description of Artificial Sequence: Synthetic oligonucleotide
  Target: ANGPTL4; (-) strand; PAM type: YTN; PAM sequence: TTC
ctgccatggtgtttttcttt

SEQ ID NO: 16031 - DNA, 20 bp, Artificial Sequence
  Description of Artificial Sequence: Synthetic oligonucleotide
  Target: ANGPTL4; (-) strand; PAM type: YTN; PAM sequence: TTT
cctgccatggtgtttttctt

SEQ ID NO: 16032 - DNA, 20 bp, Artificial Sequence
  Description of Artificial Sequence: Synthetic oligonucleotide
  Target: ANGPTL4; (-) strand; PAM type: YTN; PAM sequence: TTA
gtttcctgccatggtgtttt

SEQ ID NO: 16033 - DNA, 20 bp, Artificial Sequence
  Description of Artificial Sequence: Synthetic oligonucleotide
  Target: ANGPTL4; (-) strand; PAM type: YTN; PAM sequence: TTG
ttagtttcctgccatggtgt

SEQ ID NO: 16034 - DNA, 20 bp, Artificial Sequence
  Description of Artificial Sequence: Synthetic oligonucleotide
  Target: ANGPTL4; (-) strand; PAM type: YTN; PAM sequence: CTT
gttagtttcctgccatggtg

SEQ ID NO: 16035 - DNA, 20 bp, Artificial Sequence
  Description of Artificial Sequence: Synthetic oligonucleotide
  Target: ANGPTL4; (-) strand; PAM type: YTN; PAM sequence: CTG
gccccttgttagtttcctgc

SEQ ID NO: 16036 - DNA, 20 bp, Artificial Sequence
  Description of Artificial Sequence: Synthetic oligonucleotide
  Target: ANGPTL4; (-) strand; PAM type: YTN; PAM sequence: TTC
ctggccccttgttagtttcc

SEQ ID NO: 16037 - DNA, 20 bp, Artificial Sequence
  Description of Artificial Sequence: Synthetic oligonucleotide
  Target: ANGPTL4; (-) strand; PAM type: YTN; PAM sequence: CTT
cctggccccttgttagtttc

SEQ ID NO: 16038 - DNA, 20 bp, Artificial Sequence
  Description of Artificial Sequence: Synthetic oligonucleotide
  Target: ANGPTL4; (-) strand; PAM type: YTN; PAM sequence: TTC
acatcccagcttcctggccc

SEQ ID NO: 16039 - DNA, 20 bp, Artificial Sequence
  Description of Artificial Sequence: Synthetic oligonucleotide
  Target: ANGPTL4; (-) strand; PAM type: YTN; PAM sequence: TTA
acaggtccaggttcacatcc

SEQ ID NO: 16040 - DNA, 20 bp, Artificial Sequence
  Description of Artificial Sequence: Synthetic oligonucleotide
  Target: ANGPTL4; (-) strand; PAM type: YTN; PAM sequence: TTT
aacaggtccaggttcacatc

SEQ ID NO: 16041 - DNA, 20 bp, Artificial Sequence
  Description of Artificial Sequence: Synthetic oligonucleotide
  Target: ANGPTL4; (-) strand; PAM type: YTN; PAM sequence: CTG
gagtttaacaggtccaggtt

SEQ ID NO: 16042 - DNA, 20 bp, Artificial Sequence
  Description of Artificial Sequence: Synthetic oligonucleotide
  Target: ANGPTL4; (-) strand; PAM type: YTN; PAM sequence: CTC
tggagtttaacaggtccagg

SEQ ID NO: 16043 - DNA, 20 bp, Artificial Sequence
  Description of Artificial Sequence: Synthetic oligonucleotide
  Target: ANGPTL4; (-) strand; PAM type: YTN; PAM sequence: CTG
cagctctggagtttaacagg

SEQ ID NO: 16044 - DNA, 20 bp, Artificial Sequence
  Description of Artificial Sequence: Synthetic oligonucleotide
  Target: ANGPTL4; (-) strand; PAM type: YTN; PAM sequence: TTA
cagctgcagctctggagttt

SEQ ID NO: 16045 - DNA, 20 bp, Artificial Sequence
  Description of Artificial Sequence: Synthetic oligonucleotide
  Target: ANGPTL4; (-) strand; PAM type: YTN; PAM sequence: TTT
acagctgcagctctggagtt

SEQ ID NO: 16046 - DNA, 20 bp, Artificial Sequence
  Description of Artificial Sequence: Synthetic oligonucleotide
  Target: ANGPTL4; (-) strand; PAM type: YTN; PAM sequence: CTG
tggtccaggagagggatgtg

SEQ ID NO: 16047 - DNA, 20 bp, Artificial Sequence
  Description of Artificial Sequence: Synthetic oligonucleotide
  Target: ANGPTL4; (-) strand; PAM type: YTN; PAM sequence: CTC
ctgtggtccaggagagggat

SEQ ID NO: 16048 - DNA, 20 bp, Artificial Sequence
  Description of Artificial Sequence: Synthetic oligonucleotide
  Target: ANGPTL4; (-) strand; PAM type: YTN; PAM sequence: CTG
gggccagtgagctcctgtgg

SEQ ID NO: 16049 - DNA, 20 bp, Artificial Sequence
  Description of Artificial Sequence: Synthetic oligonucleotide
  Target: ANGPTL4; (-) strand; PAM type: YTN; PAM sequence: TTC
caaatgcaggaactggggcc

SEQ ID NO: 16050 - DNA, 20 bp, Artificial Sequence
  Description of Artificial Sequence: Synthetic oligonucleotide
  Target: ANGPTL4; (-) strand; PAM type: YTN; PAM sequence: TTT
ccaaatgcaggaactggggc

SEQ ID NO: 16051 - DNA, 20 bp, Artificial Sequence
  Description of Artificial Sequence: Synthetic oligonucleotide
  Target: ANGPTL4; (-) strand; PAM type: YTN; PAM sequence: TTT
tccaaatgcaggaactgggg

SEQ ID NO: 16052 - DNA, 20 bp, Artificial Sequence
  Description of Artificial Sequence: Synthetic oligonucleotide
  Target: ANGPTL4; (-) strand; PAM type: YTN; PAM sequence: CTC
cccacaccatgaggccagga

SEQ ID NO: 16053 - DNA, 20 bp, Artificial Sequence
  Description of Artificial Sequence: Synthetic oligonucleotide
  Target: ANGPTL4; (-) strand; PAM type: YTN; PAM sequence: TTA
ccaccccctccccacaccat

SEQ ID NO: 16054 - DNA, 20 bp, Artificial Sequence
  Description of Artificial Sequence: Synthetic oligonucleotide
  Target: ANGPTL4; (-) strand; PAM type: YTN; PAM sequence: TTT
accaccccctccccacacca

SEQ ID NO: 16055 - DNA, 20 bp, Artificial Sequence
  Description of Artificial Sequence: Synthetic oligonucleotide
  Target: ANGPTL4; (-) strand; PAM type: YTN; PAM sequence: CTT
taccaccccctccccacacc

SEQ ID NO: 16056 - DNA, 20 bp, Artificial Sequence
  Description of Artificial Sequence: Synthetic oligonucleotide
  Target: ANGPTL4; (-) strand; PAM type: YTN; PAM sequence: TTC
tttaccaccccctccccaca

SEQ ID NO: 16057 - DNA, 20 bp, Artificial Sequence
  Description of Artificial Sequence: Synthetic oligonucleotide
  Target: ANGPTL4; (-) strand; PAM type: YTN; PAM sequence: TTA
attctttaccaccccctccc

SEQ ID NO: 16058 - DNA, 20 bp, Artificial Sequence
  Description of Artificial Sequence: Synthetic oligonucleotide
  Target: ANGPTL4; (-) strand; PAM type: YTN; PAM sequence: TTA
ttaattctttaccaccccct

SEQ ID NO: 16059 - DNA, 20 bp, Artificial Sequence
  Description of Artificial Sequence: Synthetic oligonucleotide
  Target: ANGPTL4; (-) strand; PAM type: YTN; PAM sequence: CTT
attaattctttaccaccccc

SEQ ID NO: 16060 - DNA, 20 bp, Artificial Sequence
  Description of Artificial Sequence: Synthetic oligonucleotide
  Target: ANGPTL4; (-) strand; PAM type: YTN; PAM sequence: TTA
atgccttattaattctttac

SEQ ID NO: 16061 - DNA, 20 bp, Artificial Sequence
  Description of Artificial Sequence: Synthetic oligonucleotide
  Target: ANGPTL4; (-) strand; PAM type: YTN; PAM sequence: CTG
tgatgaatattaatgcctta

SEQ ID NO: 16062 - DNA, 20 bp, Artificial Sequence
  Description of Artificial Sequence: Synthetic oligonucleotide
  Target: ANGPTL4; (-) strand; PAM type: YTN; PAM sequence: CTG
gacccagcctgtgatgaata

SEQ ID NO: 16063 - DNA, 20 bp, Artificial Sequence
  Description of Artificial Sequence: Synthetic oligonucleotide
  Target: ANGPTL4; (-) strand; PAM type: YTN; PAM sequence: TTA
cagtcgcgaggcactggacc

SEQ ID NO: 16064 - DNA, 20 bp, Artificial Sequence
  Description of Artificial Sequence: Synthetic oligonucleotide
  Target: ANGPTL4; (-) strand; PAM type: YTN; PAM sequence: CTG
ggattacagtcgcgaggcac

SEQ ID NO: 16065 - DNA, 20 bp, Artificial Sequence
  Description of Artificial Sequence: Synthetic oligonucleotide
  Target: ANGPTL4; (-) strand; PAM type: YTN; PAM sequence: CTC
ccaaagagctgggattacag

SEQ ID NO: 16066 - DNA, 20 bp, Artificial Sequence
  Description of Artificial Sequence: Synthetic oligonucleotide
  Target: ANGPTL4; (-) strand; PAM type: YTN; PAM sequence: CTC
agcctcccaaagagctggga

SEQ ID NO: 16067 - DNA, 20 bp, Artificial Sequence
  Description of Artificial Sequence: Synthetic oligonucleotide
  Target: ANGPTL4; (-) strand; PAM type: YTN; PAM sequence: CTC
cagcctcagcctcccaaaga

SEQ ID NO: 16068 - DNA, 20 bp, Artificial Sequence
  Description of Artificial Sequence: Synthetic oligonucleotide
  Target: ANGPTL4; (-) strand; PAM type: YTN; PAM sequence: CTC
caaggtcctccagcctcagc

SEQ ID NO: 16069 - DNA, 20 bp, Artificial Sequence
  Description of Artificial Sequence: Synthetic oligonucleotide
  Target: ANGPTL4; (-) strand; PAM type: YTN; PAM sequence: CTC
aaactccaaggtcctccagc

SEQ ID NO: 16070 - DNA, 20 bp, Artificial Sequence
  Description of Artificial Sequence: Synthetic oligonucleotide
  Target: ANGPTL4; (-) strand; PAM type: YTN; PAM sequence: CTG
gtctcaaactccaaggtcct

SEQ ID NO: 16071 - DNA, 20 bp, Artificial Sequence
  Description of Artificial Sequence: Synthetic oligonucleotide
  Target: ANGPTL4; (-) strand; PAM type: YTN; PAM sequence: TTG
cgtaggctggtctcaaactc

SEQ ID NO: 16072 - DNA, 20 bp, Artificial Sequence
  Description of Artificial Sequence: Synthetic oligonucleotide
  Target: ANGPTL4; (-) strand; PAM type: YTN; PAM sequence: CTG
tgttgcgtaggctggtctca

SEQ ID NO: 16073 - DNA, 20 bp, Artificial Sequence
  Description of Artificial Sequence: Synthetic oligonucleotide
  Target: ANGPTL4; (-) strand; PAM type: YTN; PAM sequence: TTG
ctgtgttgcgtaggctggtc

SEQ ID NO: 16074 - DNA, 20 bp, Artificial Sequence
  Description of Artificial Sequence: Synthetic oligonucleotide
  Target: ANGPTL4; (-) strand; PAM type: YTN; PAM sequence: CTT
gctgtgttgcgtaggctggt

SEQ ID NO: 16075 - DNA, 20 bp, Artificial Sequence
  Description of Artificial Sequence: Synthetic oligonucleotide
  Target: ANGPTL4; (-) strand; PAM type: YTN; PAM sequence: TTA
tcgtagagatgaggtcttgc

SEQ ID NO: 16076 - DNA, 20 bp, Artificial Sequence
  Description of Artificial Sequence: Synthetic oligonucleotide
  Target: ANGPTL4; (-) strand; PAM type: YTN; PAM sequence: TTT
atcgtagagatgaggtcttg

SEQ ID NO: 16077 - DNA, 20 bp, Artificial Sequence
  Description of Artificial Sequence: Synthetic oligonucleotide
  Target: ANGPTL4; (-) strand; PAM type: YTN; PAM sequence: TTA
aaaatttatcgtagagatga

SEQ ID NO: 16078 - DNA, 20 bp, Artificial Sequence
  Description of Artificial Sequence: Synthetic oligonucleotide
  Target: ANGPTL4; (-) strand; PAM type: YTN; PAM sequence: TTT
aaaaatttatcgtagagatg

SEQ ID NO: 16079 - DNA, 20 bp, Artificial Sequence
  Description of Artificial Sequence: Synthetic oligonucleotide
  Target: ANGPTL4; (-) strand; PAM type: YTN; PAM sequence: TTT
taaaaatttatcgtagagat

SEQ ID NO: 16080 - DNA, 20 bp, Artificial Sequence
  Description of Artificial Sequence: Synthetic oligonucleotide
  Target: ANGPTL4; (-) strand; PAM type: YTN; PAM sequence: TTT
ttaaaaatttatcgtagaga

SEQ ID NO: 16081 - DNA, 20 bp, Artificial Sequence
  Description of Artificial Sequence: Synthetic oligonucleotide
  Target: ANGPTL4; (-) strand; PAM type: YTN; PAM sequence: CTT
tttaaaaatttatcgtagag

SEQ ID NO: 16082 - DNA, 20 bp, Artificial Sequence
  Description of Artificial Sequence: Synthetic oligonucleotide
  Target: ANGPTL4; (-) strand; PAM type: YTN; PAM sequence: CTG
cacccggactttttaaaaat

SEQ ID NO: 16083 - DNA, 20 bp, Artificial Sequence
  Description of Artificial Sequence: Synthetic oligonucleotide
  Target: ANGPTL4; (-) strand; PAM type: YTN; PAM sequence: TTA
taggcatgagccactgcacc

SEQ ID NO: 16084 - DNA, 20 bp, Artificial Sequence
  Description of Artificial Sequence: Synthetic oligonucleotide
  Target: ANGPTL4; (-) strand; PAM type: YTN; PAM sequence: CTG
ggattataggcatgagccac

SEQ ID NO: 16085 - DNA, 20 bp, Artificial Sequence
  Description of Artificial Sequence: Synthetic oligonucleotide
  Target: ANGPTL4; (-) strand; PAM type: YTN; PAM sequence: CTC
ccaaagtgctgggattatag

SEQ ID NO: 16086 - DNA, 20 bp, Artificial Sequence
  Description of Artificial Sequence: Synthetic oligonucleotide
  Target: ANGPTL4; (-) strand; PAM type: YTN; PAM sequence: TTG
gcctcccaaagtgctgggat

SEQ ID NO: 16087 - DNA, 20 bp, Artificial Sequence
  Description of Artificial Sequence: Synthetic oligonucleotide
  Target: ANGPTL4; (-) strand; PAM type: YTN; PAM sequence: CTT
ggcctcccaaagtgctggga

SEQ ID NO: 16088 - DNA, 20 bp, Artificial Sequence
  Description of Artificial Sequence: Synthetic oligonucleotide
  Target: ANGPTL4; (-) strand; PAM type: YTN; PAM sequence: CTC
atgatccacccgccttggcc

SEQ ID NO: 16089 - DNA, 20 bp, Artificial Sequence
  Description of Artificial Sequence: Synthetic oligonucleotide
  Target: ANGPTL4; (-) strand; PAM type: YTN; PAM sequence: CTA
acctcatgatccacccgcct

SEQ ID NO: 16090 - DNA, 20 bp, Artificial Sequence
  Description of Artificial Sequence: Synthetic oligonucleotide
  Target: ANGPTL4; (-) strand; PAM type: YTN; PAM sequence: CTC
ctaacctcatgatccacccg

SEQ ID NO: 16091 - DNA, 20 bp, Artificial Sequence
  Description of Artificial Sequence: Synthetic oligonucleotide
  Target: ANGPTL4; (-) strand; PAM type: YTN; PAM sequence: TTG
aactcctaacctcatgatcc

SEQ ID NO: 16092 - DNA, 20 bp, Artificial Sequence
  Description of Artificial Sequence: Synthetic oligonucleotide
  Target: ANGPTL4; (-) strand; PAM type: YTN; PAM sequence: CTT
gaactcctaacctcatgatc

SEQ ID NO: 16093 - DNA, 20 bp, Artificial Sequence
  Description of Artificial Sequence: Synthetic oligonucleotide
  Target: ANGPTL4; (-) strand; PAM type: YTN; PAM sequence: CTG
gtcttgaactcctaacctca

SEQ ID NO: 16094 - DNA, 20 bp, Artificial Sequence
  Description of Artificial Sequence: Synthetic oligonucleotide
  Target: ANGPTL4; (-) strand; PAM type: YTN; PAM sequence: TTG
gccaggctggtcttgaactc

SEQ ID NO: 16095 - DNA, 20 bp, Artificial Sequence
  Description of Artificial Sequence: Synthetic oligonucleotide
  Target: ANGPTL4; (-) strand; PAM type: YTN; PAM sequence: CTT
ggccaggctggtcttgaact

SEQ ID NO: 16096 - DNA, 20 bp, Artificial Sequence
  Description of Artificial Sequence: Synthetic oligonucleotide
  Target: ANGPTL4; (-) strand; PAM type: YTN; PAM sequence: CTA
tcttggccaggctggtcttg

SEQ ID NO: 16097 - DNA, 20 bp, Artificial Sequence
  Description of Artificial Sequence: Synthetic oligonucleotide
  Target: ANGPTL4; (-) strand; PAM type: YTN; PAM sequence: TTC
actatcttggccaggctggt

SEQ ID NO: 16098 - DNA, 20 bp, Artificial Sequence
  Description of Artificial Sequence: Synthetic oligonucleotide
  Target: ANGPTL4; (-) strand; PAM type: YTN; PAM sequence: TTT
cactatcttggccaggctgg

SEQ ID NO: 16099 - DNA, 20 bp, Artificial Sequence
  Description of Artificial Sequence: Synthetic oligonucleotide
  Target: ANGPTL4; (-) strand; PAM type: YTN; PAM sequence: TTA
gtagagatggggtttcacta

SEQ ID NO: 16100 - DNA, 20 bp, Artificial Sequence
  Description of Artificial Sequence: Synthetic oligonucleotide
  Target: ANGPTL4; (-) strand; PAM type: YTN; PAM sequence: TTT
agtagagatggggtttcact

SEQ ID NO: 16101 - DNA, 20 bp, Artificial Sequence
  Description of Artificial Sequence: Synthetic oligonucleotide
  Target: ANGPTL4; (-) strand; PAM type: YTN; PAM sequence: TTT
tagtagagatggggtttcac

SEQ ID NO: 16102 - DNA, 20 bp, Artificial Sequence
  Description of Artificial Sequence: Synthetic oligonucleotide
  Target: ANGPTL4; (-) strand; PAM type: YTN; PAM sequence: TTT
ttagtagagatggggtttca

SEQ ID NO: 16103 - DNA, 20 bp, Artificial Sequence
  Description of Artificial Sequence: Synthetic oligonucleotide
  Target: ANGPTL4; (-) strand; PAM type: YTN; PAM sequence: TTG
tatttttagtagagatgggg

SEQ ID NO: 16104 - DNA, 20 bp, Artificial Sequence
  Description of Artificial Sequence: Synthetic oligonucleotide
  Target: ANGPTL4; (-) strand; PAM type: YTN; PAM sequence: TTT
gtatttttagtagagatggg

SEQ ID NO: 16105 - DNA, 20 bp, Artificial Sequence
  Description of Artificial Sequence: Synthetic oligonucleotide
  Target: ANGPTL4; (-) strand; PAM type: YTN; PAM sequence: TTT
tgtatttttagtagagatgg

SEQ ID NO: 16106 - DNA, 20 bp, Artificial Sequence
  Description of Artificial Sequence: Synthetic oligonucleotide
  Target: ANGPTL4; (-) strand; PAM type: YTN; PAM sequence: TTT
ttgtatttttagtagagatg

SEQ ID NO: 16107 - DNA, 20 bp, Artificial Sequence
  Description of Artificial Sequence: Synthetic oligonucleotide
  Target: ANGPTL4; (-) strand; PAM type: YTN; PAM sequence: TTT
tttgtatttttagtagagat

SEQ ID NO: 16108 - DNA, 20 bp, Artificial Sequence
  Description of Artificial Sequence: Synthetic oligonucleotide
  Target: ANGPTL4; (-) strand; PAM type: YTN; PAM sequence: TTT
ttttgtatttttagtagaga

SEQ ID NO: 16109 - DNA, 20 bp, Artificial Sequence
  Description of Artificial Sequence: Synthetic oligonucleotide
  Target: ANGPTL4; (-) strand; PAM type: YTN; PAM sequence: CTA
atttttttgtatttttagta

SEQ ID NO: 16110 - DNA, 20 bp, Artificial Sequence
  Description of Artificial Sequence: Synthetic oligonucleotide
  Target: ANGPTL4; (-) strand; PAM type: YTN; PAM sequence: CTG
gctaatttttttgtattttt

SEQ ID NO: 16111 - DNA, 20 bp, Artificial Sequence
  Description of Artificial Sequence: Synthetic oligonucleotide
  Target: ANGPTL4; (-) strand; PAM type: YTN; PAM sequence: TTA
caggcgcccaccaccacacc

SEQ ID NO: 16112 - DNA, 20 bp, Artificial Sequence
  Description of Artificial Sequence: Synthetic oligonucleotide
  Target: ANGPTL4; (-) strand; PAM type: YTN; PAM sequence: CTG
ggattacaggcgcccaccac

SEQ ID NO: 16113 - DNA, 20 bp, Artificial Sequence
  Description of Artificial Sequence: Synthetic oligonucleotide
  Target: ANGPTL4; (-) strand; PAM type: YTN; PAM sequence: CTC
aagtagctgggattacaggc

SEQ ID NO: 16114 - DNA, 20 bp, Artificial Sequence
  Description of Artificial Sequence: Synthetic oligonucleotide
  Target: ANGPTL4; (-) strand; PAM type: YTN; PAM sequence: CTC
tcaagtagctgggattacag

SEQ ID NO: 16115 - DNA, 20 bp, Artificial Sequence
  Description of Artificial Sequence: Synthetic oligonucleotide
  Target: ANGPTL4; (-) strand; PAM type: YTN; PAM sequence: TTA
gcctctcaagtagctgggat

SEQ ID NO: 16116 - DNA, 20 bp, Artificial Sequence
  Description of Artificial Sequence: Synthetic oligonucleotide
  Target: ANGPTL4; (-) strand; PAM type: YTN; PAM sequence: CTT
agcctctcaagtagctggga

SEQ ID NO: 16117 - DNA, 20 bp, Artificial Sequence
  Description of Artificial Sequence: Synthetic oligonucleotide
  Target: ANGPTL4; (-) strand; PAM type: YTN; PAM sequence: CTG
ccttagcctctcaagtagct

SEQ ID NO: 16118 - DNA, 20 bp, Artificial Sequence
  Description of Artificial Sequence: Synthetic oligonucleotide
  Target: ANGPTL4; (-) strand; PAM type: YTN; PAM sequence: CTC
tgccttagcctctcaagtag

SEQ ID NO: 16119 - DNA, 20 bp, Artificial Sequence
  Description of Artificial Sequence: Synthetic oligonucleotide
  Target: ANGPTL4; (-) strand; PAM type: YTN; PAM sequence: TTC
tctgccttagcctctcaagt

SEQ ID NO: 16120 - DNA, 20 bp, Artificial Sequence
  Description of Artificial Sequence: Synthetic oligonucleotide
  Target: ANGPTL4; (-) strand; PAM type: YTN; PAM sequence: CTC
ccgagtccaagcaattctct

SEQ ID NO: 16121 - DNA, 20 bp, Artificial Sequence
  Description of Artificial Sequence: Synthetic oligonucleotide
  Target: ANGPTL4; (-) strand; PAM type: YTN; PAM sequence: CTG
cctcccgagtccaagcaatt

SEQ ID NO: 16122 - DNA, 20 bp, Artificial Sequence
  Description of Artificial Sequence: Synthetic oligonucleotide
  Target: ANGPTL4; (-) strand; PAM type: YTN; PAM sequence: CTC
tgcctcccgagtccaagcaa

SEQ ID NO: 16123 - DNA, 20 bp, Artificial Sequence
  Description of Artificial Sequence: Synthetic oligonucleotide
  Target: ANGPTL4; (-) strand; PAM type: YTN; PAM sequence: CTG
caccctctgcctcccgagtc

SEQ ID NO: 16124 - DNA, 20 bp, Artificial Sequence
  Description of Artificial Sequence: Synthetic oligonucleotide
  Target: ANGPTL4; (-) strand; PAM type: YTN; PAM sequence: CTC
actgcaccctctgcctcccg

SEQ ID NO: 16125 - DNA, 20 bp, Artificial Sequence
  Description of Artificial Sequence: Synthetic oligonucleotide
  Target: ANGPTL4; (-) strand; PAM type: YTN; PAM sequence: CTC
ggctcactgcaccctctgcc

SEQ ID NO: 16126 - DNA, 20 bp, Artificial Sequence
  Description of Artificial Sequence: Synthetic oligonucleotide
  Target: ANGPTL4; (-) strand; PAM type: YTN; PAM sequence: CTG
gagtgcagtggcatgatctc

SEQ ID NO: 16127 - DNA, 20 bp, Artificial Sequence
  Description of Artificial Sequence: Synthetic oligonucleotide
  Target: ANGPTL4; (-) strand; PAM type: YTN; PAM sequence: TTG
cccaggctggagtgcagtgg

SEQ ID NO: 16128 - DNA, 20 bp, Artificial Sequence
  Description of Artificial Sequence: Synthetic oligonucleotide
  Target: ANGPTL4; (-) strand; PAM type: YTN; PAM sequence: CTG
ttgcccaggctggagtgcag

SEQ ID NO: 16129 - DNA, 20 bp, Artificial Sequence
  Description of Artificial Sequence: Synthetic oligonucleotide
  Target: ANGPTL4; (-) strand; PAM type: YTN; PAM sequence: CTC
tgttgcccaggctggagtgc

SEQ ID NO: 16130 - DNA, 20 bp, Artificial Sequence
  Description of Artificial Sequence: Synthetic oligonucleotide
  Target: ANGPTL4; (-) strand; PAM type: YTN; PAM sequence: CTC
actctgttgcccaggctgga

SEQ ID NO: 16131 - DNA, 20 bp, Artificial Sequence
  Description of Artificial Sequence: Synthetic oligonucleotide
  Target: ANGPTL4; (-) strand; PAM type: YTN; PAM sequence: TTG
aggcagggtctcactctgtt

SEQ ID NO: 16132 - DNA, 20 bp, Artificial Sequence
  Description of Artificial Sequence: Synthetic oligonucleotide
  Target: ANGPTL4; (-) strand; PAM type: YTN; PAM sequence: TTT
gaggcagggtctcactctgt

SEQ ID NO: 16133 - DNA, 20 bp, Artificial Sequence
  Description of Artificial Sequence: Synthetic oligonucleotide
  Target: ANGPTL4; (-) strand; PAM type: YTN; PAM sequence: TTT
tgaggcagggtctcactctg

SEQ ID NO: 16134 - DNA, 20 bp, Artificial Sequence
  Description of Artificial Sequence: Synthetic oligonucleotide
  Target: ANGPTL4; (-) strand; PAM type: YTN; PAM sequence: TTT
ttgaggcagggtctcactct

SEQ ID NO: 16135 - DNA, 20 bp, Artificial Sequence
  Description of Artificial Sequence: Synthetic oligonucleotide
  Target: ANGPTL4; (-) strand; PAM type: YTN; PAM sequence: TTT
tttgaggcagggtctcactc

SEQ ID NO: 16136 - DNA, 20 bp, Artificial Sequence
  Description of Artificial Sequence: Synthetic oligonucleotide
  Target: ANGPTL4; (-) strand; PAM type: YTN; PAM sequence: TTT
ttttgaggcagggtctcact

SEQ ID NO: 16137 - DNA, 20 bp, Artificial Sequence
  Description of Artificial Sequence: Synthetic oligonucleotide
  Target: ANGPTL4; (-) strand; PAM type: YTN; PAM sequence: TTT
tttttgaggcagggtctcac

SEQ ID NO: 16138 - DNA, 20 bp, Artificial Sequence
  Description of Artificial Sequence: Synthetic oligonucleotide
  Target: ANGPTL4; (-) strand; PAM type: YTN; PAM sequence: TTT
ttttttgaggcagggtctca

SEQ ID NO: 16139 - DNA, 20 bp, Artificial Sequence
  Description of Artificial Sequence: Synthetic oligonucleotide
  Target: ANGPTL4; (-) strand; PAM type: YTN; PAM sequence: TTT
tttttttgaggcagggtctc

SEQ ID NO: 16140 - DNA, 20 bp, Artificial Sequence
  Description of Artificial Sequence: Synthetic oligonucleotide
  Target: ANGPTL4; (-) strand; PAM type: YTN; PAM sequence: TTT
ttttttttgaggcagggtct

SEQ ID NO: 16141 - DNA, 20 bp, Artificial Sequence
  Description of Artificial Sequence: Synthetic oligonucleotide
  Target: ANGPTL4; (-) strand; PAM type: YTN; PAM sequence: TTT
tttttttttgaggcagggtc

SEQ ID NO: 16142 - DNA, 20 bp, Artificial Sequence
  Description of Artificial Sequence: Synthetic oligonucleotide
  Target: ANGPTL4; (-) strand; PAM type: YTN; PAM sequence: TTT
ttttttttttgaggcagggt

SEQ ID NO: 16143 - DNA, 20 bp, Artificial Sequence
  Description of Artificial Sequence: Synthetic oligonucleotide
  Target: ANGPTL4; (-) strand; PAM type: YTN; PAM sequence: TTT
tttttttttttgaggcaggg

SEQ ID NO: 16144 - DNA, 20 bp, Artificial Sequence
  Description of Artificial Sequence: Synthetic oligonucleotide
  Target: ANGPTL4; (-) strand; PAM type: YTN; PAM sequence: TTT
ttttttttttttgaggcagg

SEQ ID NO: 16145 - DNA, 20 bp, Artificial Sequence
  Description of Artificial Sequence: Synthetic oligonucleotide
  Target: ANGPTL4; (-) strand; PAM type: YTN; PAM sequence: CTT
tttttttttttttgaggcag

SEQ ID NO: 16146 - DNA, 20 bp, Artificial Sequence
  Description of Artificial Sequence: Synthetic oligonucleotide
  Target: ANGPTL4; (-) strand; PAM type: YTN; PAM sequence: TTC
tttttttttttttttgaggc

SEQ ID NO: 16147 - DNA, 20 bp, Artificial Sequence
  Description of Artificial Sequence: Synthetic oligonucleotide
  Target: ANGPTL4; (-) strand; PAM type: YTN; PAM sequence: TTG
attctttttttttttttttg

SEQ ID NO: 16148 - DNA, 20 bp, Artificial Sequence
  Description of Artificial Sequence: Synthetic oligonucleotide
  Target: ANGPTL4; (-) strand; PAM type: YTN; PAM sequence: CTT
gattcttttttttttttttt

SEQ ID NO: 16149 - DNA, 20 bp, Artificial Sequence
  Description of Artificial Sequence: Synthetic oligonucleotide
  Target: ANGPTL4; (-) strand; PAM type: YTN; PAM sequence: CTC
ttgattcttttttttttttt

SEQ ID NO: 16150 - DNA, 20 bp, Artificial Sequence
  Description of Artificial Sequence: Synthetic oligonucleotide
  Target: ANGPTL4; (-) strand; PAM type: YTN; PAM sequence: TTC
tcttgattcttttttttttt

SEQ ID NO: 16151 - DNA, 20 bp, Artificial Sequence
  Description of Artificial Sequence: Synthetic oligonucleotide
  Target: ANGPTL4; (-) strand; PAM type: YTN; PAM sequence: TTT
ctcttgattctttttttttt

SEQ ID NO: 16152 - DNA, 20 bp, Artificial Sequence
  Description of Artificial Sequence: Synthetic oligonucleotide
  Target: ANGPTL4; (-) strand; PAM type: YTN; PAM sequence: CTG
aaatttctcttgattctttt

SEQ ID NO: 16153 - DNA, 20 bp, Artificial Sequence
  Description of Artificial Sequence: Synthetic oligonucleotide
  Target: ANGPTL4; (-) strand; PAM type: YTN; PAM sequence: CTC
tgaaatttctcttgattctt

SEQ ID NO: 16154 - DNA, 20 bp, Artificial Sequence
  Description of Artificial Sequence: Synthetic oligonucleotide
  Target: ANGPTL4; (-) strand; PAM type: YTN; PAM sequence: CTC
cctctgaaatttctcttgat

SEQ ID NO: 16155 - DNA, 20 bp, Artificial Sequence
  Description of Artificial Sequence: Synthetic oligonucleotide
  Target: ANGPTL4; (-) strand; PAM type: YTN; PAM sequence: CTC
ctccctctgaaatttctctt

SEQ ID NO: 16156 - DNA, 20 bp, Artificial Sequence
  Description of Artificial Sequence: Synthetic oligonucleotide
  Target: ANGPTL4; (-) strand; PAM type: YTN; PAM sequence: CTC
tcctccctctgaaatttctc

SEQ ID NO: 16157 - DNA, 20 bp, Artificial Sequence
  Description of Artificial Sequence: Synthetic oligonucleotide
  Target: ANGPTL4; (-) strand; PAM type: YTN; PAM sequence: CTG
tctctcctccctctgaaatt

SEQ ID NO: 16158 - DNA, 20 bp, Artificial Sequence
  Description of Artificial Sequence: Synthetic oligonucleotide
  Target: ANGPTL4; (-) strand; PAM type: YTN; PAM sequence: TTC
tgtctctcctccctctgaaa

SEQ ID NO: 16159 - DNA, 20 bp, Artificial Sequence
  Description of Artificial Sequence: Synthetic oligonucleotide
  Target: ANGPTL4; (-) strand; PAM type: YTN; PAM sequence: TTA
ttctgtctctcctccctctg

SEQ ID NO: 16160 - DNA, 20 bp, Artificial Sequence
  Description of Artificial Sequence: Synthetic oligonucleotide
  Target: ANGPTL4; (-) strand; PAM type: YTN; PAM sequence: CTT
attctgtctctcctccctct

SEQ ID NO: 16161 - DNA, 20 bp, Artificial Sequence
  Description of Artificial Sequence: Synthetic oligonucleotide
  Target: ANGPTL4; (-) strand; PAM type: YTN; PAM sequence: TTG
ccttattctgtctctcctcc

SEQ ID NO: 16162 - DNA, 20 bp, Artificial Sequence
  Description of Artificial Sequence: Synthetic oligonucleotide
  Target: ANGPTL4; (-) strand; PAM type: YTN; PAM sequence: CTC
agttgccttattctgtctct

SEQ ID NO: 16163 - DNA, 20 bp, Artificial Sequence
  Description of Artificial Sequence: Synthetic oligonucleotide
  Target: ANGPTL4; (-) strand; PAM type: YTN; PAM sequence: CTA
tcatcctcagttgccttatt

SEQ ID NO: 16164 - DNA, 20 bp, Artificial Sequence
  Description of Artificial Sequence: Synthetic oligonucleotide
  Target: ANGPTL4; (-) strand; PAM type: YTN; PAM sequence: CTC
tatcatcctcagttgcctta

SEQ ID NO: 16165 - DNA, 20 bp, Artificial Sequence
  Description of Artificial Sequence: Synthetic oligonucleotide
  Target: ANGPTL4; (-) strand; PAM type: YTN; PAM sequence: CTC
cctctatcatcctcagttgc

SEQ ID NO: 16166 - DNA, 20 bp, Artificial Sequence
  Description of Artificial Sequence: Synthetic oligonucleotide
  Target: ANGPTL4; (-) strand; PAM type: YTN; PAM sequence: CTC
cctccctctatcatcctcag

SEQ ID NO: 16167 - DNA, 20 bp, Artificial Sequence
  Description of Artificial Sequence: Synthetic oligonucleotide
  Target: ANGPTL4; (-) strand; PAM type: YTN; PAM sequence: CTG
cctccctccctctatcatcc

SEQ ID NO: 16168 - DNA, 20 bp, Artificial Sequence
  Description of Artificial Sequence: Synthetic oligonucleotide
  Target: ANGPTL4; (-) strand; PAM type: YTN; PAM sequence: CTC
tgcctccctccctctatcat

SEQ ID NO: 16169 - DNA, 20 bp, Artificial Sequence
  Description of Artificial Sequence: Synthetic oligonucleotide
  Target: ANGPTL4; (-) strand; PAM type: YTN; PAM sequence: CTC
tctgcctccctccctctatc

SEQ ID NO: 16170 - DNA, 20 bp, Artificial Sequence
  Description of Artificial Sequence: Synthetic oligonucleotide
  Target: ANGPTL4; (-) strand; PAM type: YTN; PAM sequence: CTC
ctctctgcctccctccctct

SEQ ID NO: 16171 - DNA, 20 bp, Artificial Sequence
  Description of Artificial Sequence: Synthetic oligonucleotide
  Target: ANGPTL4; (-) strand; PAM type: YTN; PAM sequence: TTC
tcctctctgcctccctccct

SEQ ID NO: 16172 - DNA, 20 bp, Artificial Sequence
  Description of Artificial Sequence: Synthetic oligonucleotide
  Target: ANGPTL4; (-) strand; PAM type: YTN; PAM sequence: CTT
ctcctctctgcctccctccc

SEQ ID NO: 16173 - DNA, 20 bp, Artificial Sequence
  Description of Artificial Sequence: Synthetic oligonucleotide
  Target: ANGPTL4; (-) strand; PAM type: YTN; PAM sequence: CTC
atcttctcctctctgcctcc

SEQ ID NO: 16174 - DNA, 20 bp, Artificial Sequence
  Description of Artificial Sequence: Synthetic oligonucleotide
  Target: ANGPTL4; (-) strand; PAM type: YTN; PAM sequence: CTG
tctcatcttctcctctctgc

SEQ ID NO: 16175 - DNA, 20 bp, Artificial Sequence
  Description of Artificial Sequence: Synthetic oligonucleotide
  Target: ANGPTL4; (-) strand; PAM type: YTN; PAM sequence: TTC
tgtctcatcttctcctctct

SEQ ID NO: 16176 - DNA, 20 bp, Artificial Sequence
  Description of Artificial Sequence: Synthetic oligonucleotide
  Target: ANGPTL4; (-) strand; PAM type: YTN; PAM sequence: CTT
ctgtctcatcttctcctctc

SEQ ID NO: 16177 - DNA, 20 bp, Artificial Sequence
  Description of Artificial Sequence: Synthetic oligonucleotide
  Target: ANGPTL4; (-) strand; PAM type: YTN; PAM sequence: CTC
ccatcaaacccagaggacat

SEQ ID NO: 16178 - DNA, 20 bp, Artificial Sequence
  Description of Artificial Sequence: Synthetic oligonucleotide
  Target: ANGPTL4; (-) strand; PAM type: YTN; PAM sequence: CTC
cctcccatcaaacccagagg

SEQ ID NO: 16179 - DNA, 20 bp, Artificial Sequence
  Description of Artificial Sequence: Synthetic oligonucleotide
  Target: ANGPTL4; (-) strand; PAM type: YTN; PAM sequence: TTC
cctccctcccatcaaaccca

SEQ ID NO: 16180 - DNA, 20 bp, Artificial Sequence
  Description of Artificial Sequence: Synthetic oligonucleotide
  Target: ANGPTL4; (-) strand; PAM type: YTN; PAM sequence: CTT
ccctccctcccatcaaaccc

SEQ ID NO: 16181 - DNA, 20 bp, Artificial Sequence
  Description of Artificial Sequence: Synthetic oligonucleotide
  Target: ANGPTL4; (-) strand; PAM type: YTN; PAM sequence: TTC
cttccctccctcccatcaaa

SEQ ID NO: 16182 - DNA, 20 bp, Artificial Sequence
  Description of Artificial Sequence: Synthetic oligonucleotide
  Target: ANGPTL4; (-) strand; PAM type: YTN; PAM sequence: CTT
ccttccctccctcccatcaa

SEQ ID NO: 16183 - DNA, 20 bp, Artificial Sequence
  Description of Artificial Sequence: Synthetic oligonucleotide
  Target: ANGPTL4; (-) strand; PAM type: YTN; PAM sequence: CTC
catccttccttccctccctc

SEQ ID NO: 16184 - DNA, 20 bp, Artificial Sequence
  Description of Artificial Sequence: Synthetic oligonucleotide
  Target: ANGPTL4; (-) strand; PAM type: YTN; PAM sequence: TTG
tgtctccatccttccttccc

SEQ ID NO: 16185 - DNA, 20 bp, Artificial Sequence
  Description of Artificial Sequence: Synthetic oligonucleotide
  Target: ANGPTL4; (-) strand; PAM type: YTN; PAM sequence: CTT
gtgtctccatccttccttcc

SEQ ID NO: 16186 - DNA, 20 bp, Artificial Sequence
  Description of Artificial Sequence: Synthetic oligonucleotide
  Target: ANGPTL4; (-) strand; PAM type: YTN; PAM sequence: CTC
ttgtgtctccatccttcctt

SEQ ID NO: 16187 - DNA, 20 bp, Artificial Sequence
  Description of Artificial Sequence: Synthetic oligonucleotide
  Target: ANGPTL4; (-) strand; PAM type: YTN; PAM sequence: CTC
cccctcttgtgtctccatcc

SEQ ID NO: 16188 - DNA, 20 bp, Artificial Sequence
  Description of Artificial Sequence: Synthetic oligonucleotide
  Target: ANGPTL4; (-) strand; PAM type: YTN; PAM sequence: TTC
cccatatccactccccctct

SEQ ID NO: 16189 - DNA, 20 bp, Artificial Sequence
  Description of Artificial Sequence: Synthetic oligonucleotide
  Target: ANGPTL4; (-) strand; PAM type: YTN; PAM sequence: CTT
ccccatatccactccccctc

SEQ ID NO: 16190 - DNA, 20 bp, Artificial Sequence
  Description of Artificial Sequence: Synthetic oligonucleotide
  Target: ANGPTL4; (-) strand; PAM type: YTN; PAM sequence: CTC
cttccccatatccactcccc

SEQ ID NO: 16191 - DNA, 20 bp, Artificial Sequence
  Description of Artificial Sequence: Synthetic oligonucleotide
  Target: ANGPTL4; (-) strand; PAM type: YTN; PAM sequence: TTG
actccttccccatatccact

SEQ ID NO: 16192 - DNA, 20 bp, Artificial Sequence
  Description of Artificial Sequence: Synthetic oligonucleotide
  Target: ANGPTL4; (-) strand; PAM type: YTN; PAM sequence: TTT
gactccttccccatatccac

SEQ ID NO: 16193 - DNA, 20 bp, Artificial Sequence
  Description of Artificial Sequence: Synthetic oligonucleotide
  Target: ANGPTL4; (-) strand; PAM type: YTN; PAM sequence: CTC
aatcccataaacaaatttga

SEQ ID NO: 16194 - DNA, 20 bp, Artificial Sequence
  Description of Artificial Sequence: Synthetic oligonucleotide
  Target: ANGPTL4; (-) strand; PAM type: YTN; PAM sequence: CTC
tcaatcccataaacaaattt

SEQ ID NO: 16195 - DNA, 20 bp, Artificial Sequence
  Description of Artificial Sequence: Synthetic oligonucleotide
  Target: ANGPTL4; (-) strand; PAM type: YTN; PAM sequence: TTC
acctctcaatcccataaaca

SEQ ID NO: 16196 - DNA, 20 bp, Artificial Sequence
  Description of Artificial Sequence: Synthetic oligonucleotide
  Target: ANGPTL4; (-) strand; PAM type: YTN; PAM sequence: CTT
cacctctcaatcccataaac

SEQ ID NO: 16197 - DNA, 20 bp, Artificial Sequence
  Description of Artificial Sequence: Synthetic oligonucleotide
  Target: ANGPTL4; (-) strand; PAM type: YTN; PAM sequence: CTA
gccggcttcacctctcaatc

SEQ ID NO: 16198 - DNA, 20 bp, Artificial Sequence
  Description of Artificial Sequence: Synthetic oligonucleotide
  Target: ANGPTL4; (-) strand; PAM type: YTN; PAM sequence: TTC
aagtccccacccgacccaga

SEQ ID NO: 16199 - DNA, 20 bp, Artificial Sequence
  Description of Artificial Sequence: Synthetic oligonucleotide
  Target: ANGPTL4; (-) strand; PAM type: YTN; PAM sequence: CTA
gacagaaaagttcaagtccc

SEQ ID NO: 16200 - DNA, 20 bp, Artificial Sequence
  Description of Artificial Sequence: Synthetic oligonucleotide
  Target: ANGPTL4; (-) strand; PAM type: YTN; PAM sequence: TTA
gctagacagaaaagttcaag

SEQ ID NO: 16201 - DNA, 20 bp, Artificial Sequence
  Description of Artificial Sequence: Synthetic oligonucleotide
  Target: ANGPTL4; (-) strand; PAM type: YTN; PAM sequence: TTT
agctagacagaaaagttcaa

SEQ ID NO: 16202 - DNA, 20 bp, Artificial Sequence
  Description of Artificial Sequence: Synthetic oligonucleotide
  Target: ANGPTL4; (-) strand; PAM type: YTN; PAM sequence: CTT
tagctagacagaaaagttca

SEQ ID NO: 16203 - DNA, 20 bp, Artificial Sequence
  Description of Artificial Sequence: Synthetic oligonucleotide
  Target: ANGPTL4; (-) strand; PAM type: YTN; PAM sequence: TTA
caatcctttagctagacaga

SEQ ID NO: 16204 - DNA, 20 bp, Artificial Sequence
  Description of Artificial Sequence: Synthetic oligonucleotide
  Target: ANGPTL4; (-) strand; PAM type: YTN; PAM sequence: TTT
acaatcctttagctagacag

SEQ ID NO: 16205 - DNA, 20 bp, Artificial Sequence
  Description of Artificial Sequence: Synthetic oligonucleotide
  Target: ANGPTL4; (-) strand; PAM type: YTN; PAM sequence: TTG
gtacgtttacaatcctttag

SEQ ID NO: 16206 - DNA, 20 bp, Artificial Sequence
  Description of Artificial Sequence: Synthetic oligonucleotide
  Target: ANGPTL4; (-) strand; PAM type: YTN; PAM sequence: CTG
attggtacgtttacaatcct

SEQ ID NO: 16207 - DNA, 20 bp, Artificial Sequence
  Description of Artificial Sequence: Synthetic oligonucleotide
  Target: ANGPTL4; (-) strand; PAM type: YTN; PAM sequence: CTA
gacacagagtgctgattggt

SEQ ID NO: 16208 - DNA, 20 bp, Artificial Sequence
  Description of Artificial Sequence: Synthetic oligonucleotide
  Target: ANGPTL4; (-) strand; PAM type: YTN; PAM sequence: TTA
gctagacacagagtgctgat

SEQ ID NO: 16209 - DNA, 20 bp, Artificial Sequence
  Description of Artificial Sequence: Synthetic oligonucleotide
  Target: ANGPTL4; (-) strand; PAM type: YTN; PAM sequence: TTT
agctagacacagagtgctga

SEQ ID NO: 16210 - DNA, 20 bp, Artificial Sequence
  Description of Artificial Sequence: Synthetic oligonucleotide
  Target: ANGPTL4; (-) strand; PAM type: YTN; PAM sequence: CTT
tagctagacacagagtgctg

SEQ ID NO: 16211 - DNA, 20 bp, Artificial Sequence
  Description of Artificial Sequence: Synthetic oligonucleotide
  Target: ANGPTL4; (-) strand; PAM type: YTN; PAM sequence: TTA
caatcctttagctagacaca

SEQ ID NO: 16212 - DNA, 20 bp, Artificial Sequence
  Description of Artificial Sequence: Synthetic oligonucleotide
  Target: ANGPTL4; (-) strand; PAM type: YTN; PAM sequence: TTT
acaatcctttagctagacac

SEQ ID NO: 16213 - DNA, 20 bp, Artificial Sequence
  Description of Artificial Sequence: Synthetic oligonucleotide
  Target: ANGPTL4; (-) strand; PAM type: YTN; PAM sequence: TTG
gtgcatttacaatcctttag

SEQ ID NO: 16214 - DNA, 20 bp, Artificial Sequence
  Description of Artificial Sequence: Synthetic oligonucleotide
  Target: ANGPTL4; (-) strand; PAM type: YTN; PAM sequence: CTG
attggtgcatttacaatcct

SEQ ID NO: 16215 - DNA, 20 bp, Artificial Sequence
  Description of Artificial Sequence: Synthetic oligonucleotide
  Target: ANGPTL4; (-) strand; PAM type: YTN; PAM sequence: CTA
gacacagagtgctgattggt

SEQ ID NO: 16216 - DNA, 20 bp, Artificial Sequence
  Description of Artificial Sequence: Synthetic oligonucleotide
  Target: ANGPTL4; (-) strand; PAM type: YTN; PAM sequence: TTA
gctagacacagagtgctgat

SEQ ID NO: 16217 - DNA, 20 bp, Artificial Sequence
  Description of Artificial Sequence: Synthetic oligonucleotide
  Target: ANGPTL4; (-) strand; PAM type: YTN; PAM sequence: TTT
agctagacacagagtgctga

SEQ ID NO: 16218 - DNA, 20 bp, Artificial Sequence
  Description of Artificial Sequence: Synthetic oligonucleotide
  Target: ANGPTL4; (-) strand; PAM type: YTN; PAM sequence: CTT
tagctagacacagagtgctg

SEQ ID NO: 16219 - DNA, 20 bp, Artificial Sequence
  Description of Artificial Sequence: Synthetic oligonucleotide
  Target: ANGPTL4; (-) strand; PAM type: YTN; PAM sequence: TTA
caaacctttagctagacaca

SEQ ID NO: 16220 - DNA, 20 bp, Artificial Sequence
  Description of Artificial Sequence: Synthetic oligonucleotide
  Target: ANGPTL4; (-) strand; PAM type: YTN; PAM sequence: TTT
acaaacctttagctagacac

SEQ ID NO: 16221 - DNA, 20 bp, Artificial Sequence
  Description of Artificial Sequence: Synthetic oligonucleotide
  Target: ANGPTL4; (-) strand; PAM type: YTN; PAM sequence: TTG
gtgcatttacaaacctttag

SEQ ID NO: 16222 - DNA, 20 bp, Artificial Sequence
  Description of Artificial Sequence: Synthetic oligonucleotide
  Target: ANGPTL4; (-) strand; PAM type: YTN; PAM sequence: CTG
attggtgcatttacaaacct

SEQ ID NO: 16223 - DNA, 20 bp, Artificial Sequence
  Description of Artificial Sequence: Synthetic oligonucleotide
  Target: ANGPTL4; (-) strand; PAM type: YTN; PAM sequence: CTA
gacacagagcgctgattggt

SEQ ID NO: 16224 - DNA, 20 bp, Artificial Sequence
  Description of Artificial Sequence: Synthetic oligonucleotide
  Target: ANGPTL4; (-) strand; PAM type: YTN; PAM sequence: TTA
gctagacacagagcgctgat

SEQ ID NO: 16225 - DNA, 20 bp, Artificial Sequence
  Description of Artificial Sequence: Synthetic oligonucleotide
  Target: ANGPTL4; (-) strand; PAM type: YTN; PAM sequence: CTG
attagctagacacagagcgc

SEQ ID NO: 16226 - DNA, 20 bp, Artificial Sequence
  Description of Artificial Sequence: Synthetic oligonucleotide
  Target: ANGPTL4; (-) strand; PAM type: YTN; PAM sequence: CTA
cctgattagctagacacaga

SEQ ID NO: 16227 - DNA, 20 bp, Artificial Sequence
  Description of Artificial Sequence: Synthetic oligonucleotide
  Target: ANGPTL4; (-) strand; PAM type: YTN; PAM sequence: CTC
caagtcccctacctgattag

SEQ ID NO: 16228 - DNA, 20 bp, Artificial Sequence
  Description of Artificial Sequence: Synthetic oligonucleotide
  Target: ANGPTL4; (-) strand; PAM type: YTN; PAM sequence: TTC
tccaagtcccctacctgatt

SEQ ID NO: 16229 - DNA, 20 bp, Artificial Sequence
  Description of Artificial Sequence: Synthetic oligonucleotide
  Target: ANGPTL4; (+) strand; PAM type: YTN; PAM sequence: CTT
gctctgtcacccaagctgga

SEQ ID NO: 16230 - DNA, 20 bp, Artificial Sequence
  Description of Artificial Sequence: Synthetic oligonucleotide
  Target: ANGPTL4; (+) strand; PAM type: YTN; PAM sequence: TTG
ctctgtcacccaagctggag

SEQ ID NO: 16231 - DNA, 20 bp, Artificial Sequence
  Description of Artificial Sequence: Synthetic oligonucleotide
  Target: ANGPTL4; (+) strand; PAM type: YTN; PAM sequence: CTC
tgtcacccaagctggagtgc

SEQ ID NO: 16232 - DNA, 20 bp, Artificial Sequence
  Description of Artificial Sequence: Synthetic oligonucleotide
  Target: ANGPTL4; (+) strand; PAM type: YTN; PAM sequence: CTG
tcacccaagctggagtgcaa

SEQ ID NO: 16233 - DNA, 20 bp, Artificial Sequence
  Description of Artificial Sequence: Synthetic oligonucleotide
  Target: ANGPTL4; (+) strand; PAM type: YTN; PAM sequence: CTG
gagtgcaatggtacgatctc

SEQ ID NO: 16234 - DNA, 20 bp, Artificial Sequence
  Description of Artificial Sequence: Synthetic oligonucleotide
  Target: ANGPTL4; (+) strand; PAM type: YTN; PAM sequence: CTC
cgcttactgcagcctccacc

SEQ ID NO: 16235 - DNA, 20 bp, Artificial Sequence
  Description of Artificial Sequence: Synthetic oligonucleotide
  Target: ANGPTL4; (+) strand; PAM type: YTN; PAM sequence: CTT
actgcagcctccacctcctg

SEQ ID NO: 16236 - DNA, 20 bp, Artificial Sequence
  Description of Artificial Sequence: Synthetic oligonucleotide
  Target: ANGPTL4; (+) strand; PAM type: YTN; PAM sequence: TTA
ctgcagcctccacctcctgg

SEQ ID NO: 16237 - DNA, 20 bp, Artificial Sequence
  Description of Artificial Sequence: Synthetic oligonucleotide
  Target: ANGPTL4; (+) strand; PAM type: YTN; PAM sequence: CTG
cagcctccacctcctgggtt

SEQ ID NO: 16238 - DNA, 20 bp, Artificial Sequence
  Description of Artificial Sequence: Synthetic oligonucleotide
  Target: ANGPTL4; (+) strand; PAM type: YTN; PAM sequence: CTC
cacctcctgggttcaagcga

SEQ ID NO: 16239 - DNA, 20 bp, Artificial Sequence
  Description of Artificial Sequence: Synthetic oligonucleotide
  Target: ANGPTL4; (+) strand; PAM type: YTN; PAM sequence: CTC
ctgggttcaagcgaatctcc

SEQ ID NO: 16240 - DNA, 20 bp, Artificial Sequence
  Description of Artificial Sequence: Synthetic oligonucleotide
  Target: ANGPTL4; (+) strand; PAM type: YTN; PAM sequence: CTG
ggttcaagcgaatctcccac

SEQ ID NO: 16241 - DNA, 20 bp, Artificial Sequence
  Description of Artificial Sequence: Synthetic oligonucleotide
  Target: ANGPTL4; (+) strand; PAM type: YTN; PAM sequence: TTC
aagcgaatctcccacctcag

SEQ ID NO: 16242 - DNA, 20 bp, Artificial Sequence
  Description of Artificial Sequence: Synthetic oligonucleotide
  Target: ANGPTL4; (+) strand; PAM type: YTN; PAM sequence: CTC
ccacctcagcctcacaaata

SEQ ID NO: 16243 - DNA, 20 bp, Artificial Sequence
  Description of Artificial Sequence: Synthetic oligonucleotide
  Target: ANGPTL4; (+) strand; PAM type: YTN; PAM sequence: CTC
agcctcacaaatagctgaga

SEQ ID NO: 16244 - DNA, 20 bp, Artificial Sequence
  Description of Artificial Sequence: Synthetic oligonucleotide
  Target: ANGPTL4; (+) strand; PAM type: YTN; PAM sequence: CTC
acaaatagctgagattacgg

SEQ ID NO: 16245 - DNA, 20 bp, Artificial Sequence
  Description of Artificial Sequence: Synthetic oligonucleotide
  Target: ANGPTL4; (+) strand; PAM type: YTN; PAM sequence: CTG
agattacggccacacaccac

SEQ ID NO: 16246 - DNA, 20 bp, Artificial Sequence
  Description of Artificial Sequence: Synthetic oligonucleotide
  Target: ANGPTL4; (+) strand; PAM type: YTN; PAM sequence: TTA
cggccacacaccaccatgcc

SEQ ID NO: 16247 - DNA, 20 bp, Artificial Sequence
  Description of Artificial Sequence: Synthetic oligonucleotide
  Target: ANGPTL4; (+) strand; PAM type: YTN; PAM sequence: CTG
ctaatttctgtatttttagt

SEQ ID NO: 16248 - DNA, 20 bp, Artificial Sequence
  Description of Artificial Sequence: Synthetic oligonucleotide
  Target: ANGPTL4; (+) strand; PAM type: YTN; PAM sequence: CTA
atttctgtatttttagtaga

SEQ ID NO: 16249 - DNA, 20 bp, Artificial Sequence
  Description of Artificial Sequence: Synthetic oligonucleotide
  Target: ANGPTL4; (+) strand; PAM type: YTN; PAM sequence: TTT
ctgtatttttagtagagatg

SEQ ID NO: 16250 - DNA, 20 bp, Artificial Sequence
  Description of Artificial Sequence: Synthetic oligonucleotide
  Target: ANGPTL4; (+) strand; PAM type: YTN; PAM sequence: TTC
tgtatttttagtagagatgg

SEQ ID NO: 16251 - DNA, 20 bp, Artificial Sequence
  Description of Artificial Sequence: Synthetic oligonucleotide
  Target: ANGPTL4; (+) strand; PAM type: YTN; PAM sequence: CTG
tatttttagtagagatgggg

SEQ ID NO: 16252 - DNA, 20 bp, Artificial Sequence
  Description of Artificial Sequence: Synthetic oligonucleotide
  Target: ANGPTL4; (+) strand; PAM type: YTN; PAM sequence: TTT
ttagtagagatggggtttca

SEQ ID NO: 16253 - DNA, 20 bp, Artificial Sequence
  Description of Artificial Sequence: Synthetic oligonucleotide
  Target: ANGPTL4; (+) strand; PAM type: YTN; PAM sequence: TTT
tagtagagatggggtttcac

SEQ ID NO: 16254 - DNA, 20 bp, Artificial Sequence
  Description of Artificial Sequence: Synthetic oligonucleotide
  Target: ANGPTL4; (+) strand; PAM type: YTN; PAM sequence: TTT
agtagagatggggtttcacc

SEQ ID NO: 16255 - DNA, 20 bp, Artificial Sequence
  Description of Artificial Sequence: Synthetic oligonucleotide
  Target: ANGPTL4; (+) strand; PAM type: YTN; PAM sequence: TTA
gtagagatggggtttcacca

SEQ ID NO: 16256 - DNA, 20 bp, Artificial Sequence
  Description of Artificial Sequence: Synthetic oligonucleotide
  Target: ANGPTL4; (+) strand; PAM type: YTN; PAM sequence: TTT
caccatgctggccaggctgg

SEQ ID NO: 16257 - DNA, 20 bp, Artificial Sequence
  Description of Artificial Sequence: Synthetic oligonucleotide
  Target: ANGPTL4; (+) strand; PAM type: YTN; PAM sequence: TTC
accatgctggccaggctggt

SEQ ID NO: 16258 - DNA, 20 bp, Artificial Sequence
  Description of Artificial Sequence: Synthetic oligonucleotide
  Target: ANGPTL4; (+) strand; PAM type: YTN; PAM sequence: CTG
gccaggctggtctcgaactc

SEQ ID NO: 16259 - DNA, 20 bp, Artificial Sequence
  Description of Artificial Sequence: Synthetic oligonucleotide
  Target: ANGPTL4; (+) strand; PAM type: YTN; PAM sequence: CTG
gtctcgaactcccagactca

SEQ ID NO: 16260 - DNA, 20 bp, Artificial Sequence
  Description of Artificial Sequence: Synthetic oligonucleotide
  Target: ANGPTL4; (+) strand; PAM type: YTN; PAM sequence: CTC
gaactcccagactcaagtga

SEQ ID NO: 16261 - DNA, 20 bp, Artificial Sequence
  Description of Artificial Sequence: Synthetic oligonucleotide
  Target: ANGPTL4; (+) strand; PAM type: YTN; PAM sequence: CTC
ccagactcaagtgatccacc

SEQ ID NO: 16262 - DNA, 20 bp, Artificial Sequence
  Description of Artificial Sequence: Synthetic oligonucleotide
  Target: ANGPTL4; (+) strand; PAM type: YTN; PAM sequence: CTC
aagtgatccacccacctcag

SEQ ID NO: 16263 - DNA, 20 bp, Artificial Sequence
  Description of Artificial Sequence: Synthetic oligonucleotide
  Target: ANGPTL4; (+) strand; PAM type: YTN; PAM sequence: CTC
agcctcccaaagtgctagga

SEQ ID NO: 16264 - DNA, 20 bp, Artificial Sequence
  Description of Artificial Sequence: Synthetic oligonucleotide
  Target: ANGPTL4; (+) strand; PAM type: YTN; PAM sequence: CTC
ccaaagtgctaggattacag

SEQ ID NO: 16265 - DNA, 20 bp, Artificial Sequence
  Description of Artificial Sequence: Synthetic oligonucleotide
  Target: ANGPTL4; (+) strand; PAM type: YTN; PAM sequence: CTA
ggattacaggtgtgagccac

SEQ ID NO: 16266 - DNA, 20 bp, Artificial Sequence
  Description of Artificial Sequence: Synthetic oligonucleotide
  Target: ANGPTL4; (+) strand; PAM type: YTN; PAM sequence: TTA
caggtgtgagccaccatgcc

SEQ ID NO: 16267 - DNA, 20 bp, Artificial Sequence
  Description of Artificial Sequence: Synthetic oligonucleotide
  Target: ANGPTL4; (+) strand; PAM type: YTN; PAM sequence: CTA
atttttttttttttttgaga

SEQ ID NO: 16268 - DNA, 20 bp, Artificial Sequence
  Description of Artificial Sequence: Synthetic oligonucleotide
  Target: ANGPTL4; (+) strand; PAM type: YTN; PAM sequence: TTT
ttttttttttttgagacaga

SEQ ID NO: 16269 - DNA, 20 bp, Artificial Sequence
  Description of Artificial Sequence: Synthetic oligonucleotide
  Target: ANGPTL4; (+) strand; PAM type: YTN; PAM sequence: TTT
tttttttttttgagacagag

SEQ ID NO: 16270 - DNA, 20 bp, Artificial Sequence
  Description of Artificial Sequence: Synthetic oligonucleotide
  Target: ANGPTL4; (+) strand; PAM type: YTN; PAM sequence: TTT
ttttttttttgagacagagt

SEQ ID NO: 16271 - DNA, 20 bp, Artificial Sequence
  Description of Artificial Sequence: Synthetic oligonucleotide
  Target: ANGPTL4; (+) strand; PAM type: YTN; PAM sequence: TTT
tttttttttgagacagagtc

SEQ ID NO: 16272 - DNA, 20 bp, Artificial Sequence
  Description of Artificial Sequence: Synthetic oligonucleotide
  Target: ANGPTL4; (+) strand; PAM type: YTN; PAM sequence: TTT
ttttttttgagacagagtct

SEQ ID NO: 16273 - DNA, 20 bp, Artificial Sequence
  Description of Artificial Sequence: Synthetic oligonucleotide
  Target: ANGPTL4; (+) strand; PAM type: YTN; PAM sequence: TTT
tttttttgagacagagtctc

SEQ ID NO: 16274 - DNA, 20 bp, Artificial Sequence
  Description of Artificial Sequence: Synthetic oligonucleotide
  Target: ANGPTL4; (+) strand; PAM type: YTN; PAM sequence: TTT
ttttttgagacagagtctcg

SEQ ID NO: 16275 - DNA, 20 bp, Artificial Sequence
  Description of Artificial Sequence: Synthetic oligonucleotide
  Target: ANGPTL4; (+) strand; PAM type: YTN; PAM sequence: TTT
tttttgagacagagtctcgc

SEQ ID NO: 16276 - DNA, 20 bp, Artificial Sequence
  Description of Artificial Sequence: Synthetic oligonucleotide
  Target: ANGPTL4; (+) strand; PAM type: YTN; PAM sequence: TTT
ttttgagacagagtctcgcc

SEQ ID NO: 16277 - DNA, 20 bp, Artificial Sequence
  Description of Artificial Sequence: Synthetic oligonucleotide
  Target: ANGPTL4; (+) strand; PAM type: YTN; PAM sequence: TTT
tttgagacagagtctcgccc

SEQ ID NO: 16278 - DNA, 20 bp, Artificial Sequence
  Description of Artificial Sequence: Synthetic oligonucleotide
  Target: ANGPTL4; (+) strand; PAM type: YTN; PAM sequence: TTT
ttgagacagagtctcgccct

SEQ ID NO: 16279 - DNA, 20 bp, Artificial Sequence
  Description of Artificial Sequence: Synthetic oligonucleotide
  Target: ANGPTL4; (+) strand; PAM type: YTN; PAM sequence: TTT
tgagacagagtctcgccctg

SEQ ID NO: 16280 - DNA, 20 bp, Artificial Sequence
  Description of Artificial Sequence: Synthetic oligonucleotide
  Target: ANGPTL4; (+) strand; PAM type: YTN; PAM sequence: TTT
gagacagagtctcgccctgt

SEQ ID NO: 16281 - DNA, 20 bp, Artificial Sequence
  Description of Artificial Sequence: Synthetic oligonucleotide
  Target: ANGPTL4; (+) strand; PAM type: YTN; PAM sequence: TTG
agacagagtctcgccctgtt

SEQ ID NO: 16282 - DNA, 20 bp, Artificial Sequence
  Description of Artificial Sequence: Synthetic oligonucleotide
  Target: ANGPTL4; (+) strand; PAM type: YTN; PAM sequence: CTC
gccctgttgcccaggctgga

SEQ ID NO: 16283 - DNA, 20 bp, Artificial Sequence
  Description of Artificial Sequence: Synthetic oligonucleotide
  Target: ANGPTL4; (+) strand; PAM type: YTN; PAM sequence: CTG
ttgcccaggctggagtgcag

SEQ ID NO: 16284 - DNA, 20 bp, Artificial Sequence
  Description of Artificial Sequence: Synthetic oligonucleotide
  Target: ANGPTL4; (+) strand; PAM type: YTN; PAM sequence: TTG
cccaggctggagtgcagtgg

SEQ ID NO: 16285 - DNA, 20 bp, Artificial Sequence
  Description of Artificial Sequence: Synthetic oligonucleotide
  Target: ANGPTL4; (+) strand; PAM type: YTN; PAM sequence: CTG
gagtgcagtggcgcaatctc

SEQ ID NO: 16286 - DNA, 20 bp, Artificial Sequence
  Description of Artificial Sequence: Synthetic oligonucleotide
  Target: ANGPTL4; (+) strand; PAM type: YTN; PAM sequence: CTC
tgcttactgcaccctctgcc

SEQ ID NO: 16287 - DNA, 20 bp, Artificial Sequence
  Description of Artificial Sequence: Synthetic oligonucleotide
  Target: ANGPTL4; (+) strand; PAM type: YTN; PAM sequence: CTG
cttactgcaccctctgcctc

SEQ ID NO: 16288 - DNA, 20 bp, Artificial Sequence
  Description of Artificial Sequence: Synthetic oligonucleotide
  Target: ANGPTL4; (+) strand; PAM type: YTN; PAM sequence: CTT
actgcaccctctgcctcccg

SEQ ID NO: 16289 - DNA, 20 bp, Artificial Sequence
  Description of Artificial Sequence: Synthetic oligonucleotide
  Target: ANGPTL4; (+) strand; PAM type: YTN; PAM sequence: TTA
ctgcaccctctgcctcccgg

SEQ ID NO: 16290 - DNA, 20 bp, Artificial Sequence
  Description of Artificial Sequence: Synthetic oligonucleotide
  Target: ANGPTL4; (+) strand; PAM type: YTN; PAM sequence: CTG
caccctctgcctcccgggtt

SEQ ID NO: 16291 - DNA, 20 bp, Artificial Sequence
  Description of Artificial Sequence: Synthetic oligonucleotide
  Target: ANGPTL4; (+) strand; PAM type: YTN; PAM sequence: CTC
tgcctcccgggttccagcga

SEQ ID NO: 16292 - DNA, 20 bp, Artificial Sequence
  Description of Artificial Sequence: Synthetic oligonucleotide
  Target: ANGPTL4; (+) strand; PAM type: YTN; PAM sequence: CTG
cctcccgggttccagcgatt

SEQ ID NO: 16293 - DNA, 20 bp, Artificial Sequence
  Description of Artificial Sequence: Synthetic oligonucleotide
  Target: ANGPTL4; (+) strand; PAM type: YTN; PAM sequence: CTC
ccgggttccagcgattctcc

SEQ ID NO: 16294 - DNA, 20 bp, Artificial Sequence
  Description of Artificial Sequence: Synthetic oligonucleotide
  Target: ANGPTL4; (+) strand; PAM type: YTN; PAM sequence: TTC
cagcgattctcctgccccag

SEQ ID NO: 16295 - DNA, 20 bp, Artificial Sequence
  Description of Artificial Sequence: Synthetic oligonucleotide
  Target: ANGPTL4; (+) strand; PAM type: YTN; PAM sequence: TTC
tcctgccccagcctcccgag

SEQ ID NO: 16296 - DNA, 20 bp, Artificial Sequence
  Description of Artificial Sequence: Synthetic oligonucleotide
  Target: ANGPTL4; (+) strand; PAM type: YTN; PAM sequence: CTC
ctgccccagcctcccgagta

SEQ ID NO: 16297 - DNA, 20 bp, Artificial Sequence
  Description of Artificial Sequence: Synthetic oligonucleotide
  Target: ANGPTL4; (+) strand; PAM type: YTN; PAM sequence: CTG
ccccagcctcccgagtaact

SEQ ID NO: 16298 - DNA, 20 bp, Artificial Sequence
  Description of Artificial Sequence: Synthetic oligonucleotide
  Target: ANGPTL4; (+) strand; PAM type: YTN; PAM sequence: CTC
ccgagtaactgggattacag

SEQ ID NO: 16299 - DNA, 20 bp, Artificial Sequence
  Description of Artificial Sequence: Synthetic oligonucleotide
  Target: ANGPTL4; (+) strand; PAM type: YTN; PAM sequence: CTG
ggattacaggcgcgcgcctc

SEQ ID NO: 16300 - DNA, 20 bp, Artificial Sequence
  Description of Artificial Sequence: Synthetic oligonucleotide
  Target: ANGPTL4; (+) strand; PAM type: YTN; PAM sequence: TTA
caggcgcgcgcctccacgcc

SEQ ID NO: 16301 - DNA, 20 bp, Artificial Sequence
  Description of Artificial Sequence: Synthetic oligonucleotide
  Target: ANGPTL4; (+) strand; PAM type: YTN; PAM sequence: CTC
cacgcctggctaatttttac

SEQ ID NO: 16302 - DNA, 20 bp, Artificial Sequence
  Description of Artificial Sequence: Synthetic oligonucleotide
  Target: ANGPTL4; (+) strand; PAM type: YTN; PAM sequence: CTG
gctaatttttacatttttag

SEQ ID NO: 16303 - DNA, 20 bp, Artificial Sequence
  Description of Artificial Sequence: Synthetic oligonucleotide
  Target: ANGPTL4; (+) strand; PAM type: YTN; PAM sequence: CTA
atttttacatttttagtaga

SEQ ID NO: 16304 - DNA, 20 bp, Artificial Sequence
  Description of Artificial Sequence: Synthetic oligonucleotide
  Target: ANGPTL4; (+) strand; PAM type: YTN; PAM sequence: TTT
ttacatttttagtagagacc

SEQ ID NO: 16305 - DNA, 20 bp, Artificial Sequence
  Description of Artificial Sequence: Synthetic oligonucleotide
  Target: ANGPTL4; (+) strand; PAM type: YTN; PAM sequence: TTT
tacatttttagtagagaccg

SEQ ID NO: 16306 - DNA, 20 bp, Artificial Sequence
  Description of Artificial Sequence: Synthetic oligonucleotide
  Target: ANGPTL4; (+) strand; PAM type: YTN; PAM sequence: TTT
acatttttagtagagaccgg

SEQ ID NO: 16307 - DNA, 20 bp, Artificial Sequence
  Description of Artificial Sequence: Synthetic oligonucleotide
  Target: ANGPTL4; (+) strand; PAM type: YTN; PAM sequence: TTA
catttttagtagagaccggg

SEQ ID NO: 16308 - DNA, 20 bp, Artificial Sequence
  Description of Artificial Sequence: Synthetic oligonucleotide
  Target: ANGPTL4; (+) strand; PAM type: YTN; PAM sequence: TTT
ttagtagagaccgggtttca

SEQ ID NO: 16309 - DNA, 20 bp, Artificial Sequence
  Description of Artificial Sequence: Synthetic oligonucleotide
  Target: ANGPTL4; (+) strand; PAM type: YTN; PAM sequence: TTT
tagtagagaccgggtttcac

SEQ ID NO: 16310 - DNA, 20 bp, Artificial Sequence
  Description of Artificial Sequence: Synthetic oligonucleotide
  Target: ANGPTL4; (+) strand; PAM type: YTN; PAM sequence: TTT
agtagagaccgggtttcacc

SEQ ID NO: 16311 - DNA, 20 bp, Artificial Sequence
  Description of Artificial Sequence: Synthetic oligonucleotide
  Target: ANGPTL4; (+) strand; PAM type: YTN; PAM sequence: TTA
gtagagaccgggtttcacca

SEQ ID NO: 16312 - DNA, 20 bp, Artificial Sequence
  Description of Artificial Sequence: Synthetic oligonucleotide
  Target: ANGPTL4; (+) strand; PAM type: YTN; PAM sequence: TTT
caccatgttggtcaggctgg

SEQ ID NO: 16313 - DNA, 20 bp, Artificial Sequence
  Description of Artificial Sequence: Synthetic oligonucleotide
  Target: ANGPTL4; (+) strand; PAM type: YTN; PAM sequence: TTC
accatgttggtcaggctggt

SEQ ID NO: 16314 - DNA, 20 bp, Artificial Sequence
  Description of Artificial Sequence: Synthetic oligonucleotide
  Target: ANGPTL4; (+) strand; PAM type: YTN; PAM sequence: TTG
gtcaggctggtctcgaactt

SEQ ID NO: 16315 - DNA, 20 bp, Artificial Sequence
  Description of Artificial Sequence: Synthetic oligonucleotide
  Target: ANGPTL4; (+) strand; PAM type: YTN; PAM sequence: CTG
gtctcgaacttctgacctca

SEQ ID NO: 16316 - DNA, 20 bp, Artificial Sequence
  Description of Artificial Sequence: Synthetic oligonucleotide
  Target: ANGPTL4; (+) strand; PAM type: YTN; PAM sequence: CTC
gaacttctgacctcacgatc

SEQ ID NO: 16317 - DNA, 20 bp, Artificial Sequence
  Description of Artificial Sequence: Synthetic oligonucleotide
  Target: ANGPTL4; (+) strand; PAM type: YTN; PAM sequence: CTT
ctgacctcacgatctgccca

SEQ ID NO: 16318 - DNA, 20 bp, Artificial Sequence
  Description of Artificial Sequence: Synthetic oligonucleotide
  Target: ANGPTL4; (+) strand; PAM type: YTN; PAM sequence: TTC
tgacctcacgatctgcccac

SEQ ID NO: 16319 - DNA, 20 bp, Artificial Sequence
  Description of Artificial Sequence: Synthetic oligonucleotide
  Target: ANGPTL4; (+) strand; PAM type: YTN; PAM sequence: CTG
acctcacgatctgcccacct

SEQ ID NO: 16320 - DNA, 20 bp, Artificial Sequence
  Description of Artificial Sequence: Synthetic oligonucleotide
  Target: ANGPTL4; (+) strand; PAM type: YTN; PAM sequence: CTC
acgatctgcccaccttggac

SEQ ID NO: 16321 - DNA, 20 bp, Artificial Sequence
  Description of Artificial Sequence: Synthetic oligonucleotide
  Target: ANGPTL4; (+) strand; PAM type: YTN; PAM sequence: CTG
cccaccttggactcccaaag

SEQ ID NO: 16322 - DNA, 20 bp, Artificial Sequence
  Description of Artificial Sequence: Synthetic oligonucleotide
  Target: ANGPTL4; (+) strand; PAM type: YTN; PAM sequence: CTT
ggactcccaaagtgctggta

SEQ ID NO: 16323 - DNA, 20 bp, Artificial Sequence
  Description of Artificial Sequence: Synthetic oligonucleotide
  Target: ANGPTL4; (+) strand; PAM type: YTN; PAM sequence: TTG
gactcccaaagtgctggtat

SEQ ID NO: 16324 - DNA, 20 bp, Artificial Sequence
  Description of Artificial Sequence: Synthetic oligonucleotide
  Target: ANGPTL4; (+) strand; PAM type: YTN; PAM sequence: CTC
ccaaagtgctggtattacag

SEQ ID NO: 16325 - DNA, 20 bp, Artificial Sequence
  Description of Artificial Sequence: Synthetic oligonucleotide
  Target: ANGPTL4; (+) strand; PAM type: YTN; PAM sequence: CTG
gtattacaggcatgagccac

SEQ ID NO: 16326 - DNA, 20 bp, Artificial Sequence
  Description of Artificial Sequence: Synthetic oligonucleotide
  Target: ANGPTL4; (+) strand; PAM type: YTN; PAM sequence: TTA
caggcatgagccaccgtgcc

SEQ ID NO: 16327 - DNA, 20 bp, Artificial Sequence
  Description of Artificial Sequence: Synthetic oligonucleotide
  Target: ANGPTL4; (+) strand; PAM type: YTN; PAM sequence: CTG
gccccagctaattttttaaa

SEQ ID NO: 16328 - DNA, 20 bp, Artificial Sequence
  Description of Artificial Sequence: Synthetic oligonucleotide
  Target: ANGPTL4; (+) strand; PAM type: YTN; PAM sequence: CTA
attttttaaattttttgtac

SEQ ID NO: 16329 - DNA, 20 bp, Artificial Sequence
  Description of Artificial Sequence: Synthetic oligonucleotide
  Target: ANGPTL4; (+) strand; PAM type: YTN; PAM sequence: TTT
tttaaattttttgtacagac

SEQ ID NO: 16330 - DNA, 20 bp, Artificial Sequence
  Description of Artificial Sequence: Synthetic oligonucleotide
  Target: ANGPTL4; (+) strand; PAM type: YTN; PAM sequence: TTT
ttaaattttttgtacagaca

SEQ ID NO: 16331 - DNA, 20 bp, Artificial Sequence
  Description of Artificial Sequence: Synthetic oligonucleotide
  Target: ANGPTL4; (+) strand; PAM type: YTN; PAM sequence: TTT
taaattttttgtacagacag

SEQ ID NO: 16332 - DNA, 20 bp, Artificial Sequence
  Description of Artificial Sequence: Synthetic oligonucleotide
  Target: ANGPTL4; (+) strand; PAM type: YTN; PAM sequence: TTT
aaattttttgtacagacagg

SEQ ID NO: 16333 - DNA, 20 bp, Artificial Sequence
  Description of Artificial Sequence: Synthetic oligonucleotide
  Target: ANGPTL4; (+) strand; PAM type: YTN; PAM sequence: TTA
aattttttgtacagacaggg

SEQ ID NO: 16334 - DNA, 20 bp, Artificial Sequence
  Description of Artificial Sequence: Synthetic oligonucleotide
  Target: ANGPTL4; (+) strand; PAM type: YTN; PAM sequence: TTT
tttgtacagacagggtcttg

SEQ ID NO: 16335 - DNA, 20 bp, Artificial Sequence
  Description of Artificial Sequence: Synthetic oligonucleotide
  Target: ANGPTL4; (+) strand; PAM type: YTN; PAM sequence: TTT
ttgtacagacagggtcttgc

SEQ ID NO: 16336 - DNA, 20 bp, Artificial Sequence
  Description of Artificial Sequence: Synthetic oligonucleotide
  Target: ANGPTL4; (+) strand; PAM type: YTN; PAM sequence: TTT
tgtacagacagggtcttgcc

SEQ ID NO: 16337 - DNA, 20 bp, Artificial Sequence
  Description of Artificial Sequence: Synthetic oligonucleotide
  Target: ANGPTL4; (+) strand; PAM type: YTN; PAM sequence: TTT
gtacagacagggtcttgcca

SEQ ID NO: 16338 - DNA, 20 bp, Artificial Sequence
  Description of Artificial Sequence: Synthetic oligonucleotide
  Target: ANGPTL4; (+) strand; PAM type: YTN; PAM sequence: TTG
tacagacagggtcttgccat

SEQ ID NO: 16339 - DNA, 20 bp, Artificial Sequence
  Description of Artificial Sequence: Synthetic oligonucleotide
  Target: ANGPTL4; (+) strand; PAM type: YTN; PAM sequence: CTT
gccatgttacccaatcttga

SEQ ID NO: 16340 - DNA, 20 bp, Artificial Sequence
  Description of Artificial Sequence: Synthetic oligonucleotide
  Target: ANGPTL4; (+) strand; PAM type: YTN; PAM sequence: TTG
ccatgttacccaatcttgaa

SEQ ID NO: 16341 - DNA, 20 bp, Artificial Sequence
  Description of Artificial Sequence: Synthetic oligonucleotide
  Target: ANGPTL4; (+) strand; PAM type: YTN; PAM sequence: TTA
cccaatcttgaactcctggg

SEQ ID NO: 16342 - DNA, 20 bp, Artificial Sequence
  Description of Artificial Sequence: Synthetic oligonucleotide
  Target: ANGPTL4; (+) strand; PAM type: YTN; PAM sequence: CTT
gaactcctgggctcaagcag

SEQ ID NO: 16343 - DNA, 20 bp, Artificial Sequence
  Description of Artificial Sequence: Synthetic oligonucleotide
  Target: ANGPTL4; (+) strand; PAM type: YTN; PAM sequence: TTG
aactcctgggctcaagcagt

SEQ ID NO: 16344 - DNA, 20 bp, Artificial Sequence
  Description of Artificial Sequence: Synthetic oligonucleotide
  Target: ANGPTL4; (+) strand; PAM type: YTN; PAM sequence: CTC
ctgggctcaagcagtcctcc

SEQ ID NO: 16345 - DNA, 20 bp, Artificial Sequence
  Description of Artificial Sequence: Synthetic oligonucleotide
  Target: ANGPTL4; (+) strand; PAM type: YTN; PAM sequence: CTG
ggctcaagcagtcctcccac

SEQ ID NO: 16346 - DNA, 20 bp, Artificial Sequence
  Description of Artificial Sequence: Synthetic oligonucleotide
  Target: ANGPTL4; (+) strand; PAM type: YTN; PAM sequence: CTC
aagcagtcctcccaccttgg

SEQ ID NO: 16347 - DNA, 20 bp, Artificial Sequence
  Description of Artificial Sequence: Synthetic oligonucleotide
  Target: ANGPTL4; (+) strand; PAM type: YTN; PAM sequence: CTC
ccaccttggcctcccaaagt

SEQ ID NO: 16348 - DNA, 20 bp, Artificial Sequence
  Description of Artificial Sequence: Synthetic oligonucleotide
  Target: ANGPTL4; (+) strand; PAM type: YTN; PAM sequence: CTT
ggcctcccaaagtactggga

SEQ ID NO: 16349 - DNA, 20 bp, Artificial Sequence
  Description of Artificial Sequence: Synthetic oligonucleotide
  Target: ANGPTL4; (+) strand; PAM type: YTN; PAM sequence: TTG
gcctcccaaagtactgggat

SEQ ID NO: 16350 - DNA, 20 bp, Artificial Sequence
  Description of Artificial Sequence: Synthetic oligonucleotide
  Target: ANGPTL4; (+) strand; PAM type: YTN; PAM sequence: CTC
ccaaagtactgggattacaa

SEQ ID NO: 16351 - DNA, 20 bp, Artificial Sequence
  Description of Artificial Sequence: Synthetic oligonucleotide
  Target: ANGPTL4; (+) strand; PAM type: YTN; PAM sequence: CTG
ggattacaagcatgagccac

SEQ ID NO: 16352 - DNA, 20 bp, Artificial Sequence
  Description of Artificial Sequence: Synthetic oligonucleotide
  Target: ANGPTL4; (+) strand; PAM type: YTN; PAM sequence: TTA
caagcatgagccaccttgcc

SEQ ID NO: 16353 - DNA, 20 bp, Artificial Sequence
  Description of Artificial Sequence: Synthetic oligonucleotide
  Target: ANGPTL4; (+) strand; PAM type: YTN; PAM sequence: CTT
gcctagcttaatggcattta

SEQ ID NO: 16354 - DNA, 20 bp, Artificial Sequence
  Description of Artificial Sequence: Synthetic oligonucleotide
  Target: ANGPTL4; (+) strand; PAM type: YTN; PAM sequence: TTG
cctagcttaatggcatttac

SEQ ID NO: 16355 - DNA, 20 bp, Artificial Sequence
  Description of Artificial Sequence: Synthetic oligonucleotide
  Target: ANGPTL4; (+) strand; PAM type: YTN; PAM sequence: CTA
gcttaatggcatttacattt

SEQ ID NO: 16356 - DNA, 20 bp, Artificial Sequence
  Description of Artificial Sequence: Synthetic oligonucleotide
  Target: ANGPTL4; (+) strand; PAM type: YTN; PAM sequence: CTT
aatggcatttacatttgtag

SEQ ID NO: 16357 - DNA, 20 bp, Artificial Sequence
  Description of Artificial Sequence: Synthetic oligonucleotide
  Target: ANGPTL4; (+) strand; PAM type: YTN; PAM sequence: TTA
atggcatttacatttgtagt

SEQ ID NO: 16358 - DNA, 20 bp, Artificial Sequence
  Description of Artificial Sequence: Synthetic oligonucleotide
  Target: ANGPTL4; (+) strand; PAM type: YTN; PAM sequence: TTT
acatttgtagtgaaatacac

SEQ ID NO: 16359 - DNA, 20 bp, Artificial Sequence
  Description of Artificial Sequence: Synthetic oligonucleotide
  Target: ANGPTL4; (+) strand; PAM type: YTN; PAM sequence: TTA
catttgtagtgaaatacaca

SEQ ID NO: 16360 - DNA, 20 bp, Artificial Sequence
  Description of Artificial Sequence: Synthetic oligonucleotide
  Target: ANGPTL4; (+) strand; PAM type: YTN; PAM sequence: TTT
gtagtgaaatacacataaca

SEQ ID NO: 16361 - DNA, 20 bp, Artificial Sequence
  Description of Artificial Sequence: Synthetic oligonucleotide
  Target: ANGPTL4; (+) strand; PAM type: YTN; PAM sequence: TTG
tagtgaaatacacataacag

SEQ ID NO: 16362 - DNA, 20 bp, Artificial Sequence
  Description of Artificial Sequence: Synthetic oligonucleotide
  Target: ANGPTL4; (+) strand; PAM type: YTN; PAM sequence: CTG
ggcgcagtggctcatacctg

SEQ ID NO: 16363 - DNA, 20 bp, Artificial Sequence
  Description of Artificial Sequence: Synthetic oligonucleotide
  Target: ANGPTL4; (+) strand; PAM type: YTN; PAM sequence: CTC
atacctgtaatcccagcact

SEQ ID NO: 16364 - DNA, 20 bp, Artificial Sequence
  Description of Artificial Sequence: Synthetic oligonucleotide
  Target: ANGPTL4; (+) strand; PAM type: YTN; PAM sequence: CTG
taatcccagcactttgggag

SEQ ID NO: 16365 - DNA, 20 bp, Artificial Sequence
  Description of Artificial Sequence: Synthetic oligonucleotide
  Target: ANGPTL4; (+) strand; PAM type: YTN; PAM sequence: CTT
tgggaggccgaggtaggcgg

SEQ ID NO: 16366 - DNA, 20 bp, Artificial Sequence
  Description of Artificial Sequence: Synthetic oligonucleotide
  Target: ANGPTL4; (+) strand; PAM type: YTN; PAM sequence: TTT
gggaggccgaggtaggcgga

SEQ ID NO: 16367 - DNA, 20 bp, Artificial Sequence
  Description of Artificial Sequence: Synthetic oligonucleotide
  Target: ANGPTL4; (+) strand; PAM type: YTN; PAM sequence: TTG
ggaggccgaggtaggcggat

SEQ ID NO: 16368 - DNA, 20 bp, Artificial Sequence
  Description of Artificial Sequence: Synthetic oligonucleotide
  Target: ANGPTL4; (+) strand; PAM type: YTN; PAM sequence: CTG
aggtcaggagttagagacca

SEQ ID NO: 16369 - DNA, 20 bp, Artificial Sequence
  Description of Artificial Sequence: Synthetic oligonucleotide
  Target: ANGPTL4; (+) strand; PAM type: YTN; PAM sequence: TTA
gagaccagcctggacatggc

SEQ ID NO: 16370 - DNA, 20 bp, Artificial Sequence
  Description of Artificial Sequence: Synthetic oligonucleotide
  Target: ANGPTL4; (+) strand; PAM type: YTN; PAM sequence: CTG
gacatggcgaaaccccgtct

SEQ ID NO: 16371 - DNA, 20 bp, Artificial Sequence
  Description of Artificial Sequence: Synthetic oligonucleotide
  Target: ANGPTL4; (+) strand; PAM type: YTN; PAM sequence: CTC
tactaaaatacaaaaattag

SEQ ID NO: 16372 - DNA, 20 bp, Artificial Sequence
  Description of Artificial Sequence: Synthetic oligonucleotide
  Target: ANGPTL4; (+) strand; PAM type: YTN; PAM sequence: CTA
ctaaaatacaaaaattagcc

SEQ ID NO: 16373 - DNA, 20 bp, Artificial Sequence
  Description of Artificial Sequence: Synthetic oligonucleotide
  Target: ANGPTL4; (+) strand; PAM type: YTN; PAM sequence: CTA
aaatacaaaaattagccagg

SEQ ID NO: 16374 - DNA, 20 bp, Artificial Sequence
  Description of Artificial Sequence: Synthetic oligonucleotide
  Target: ANGPTL4; (+) strand; PAM type: YTN; PAM sequence: TTA
gccaggcgtggtggtgggca

SEQ ID NO: 16375 - DNA, 20 bp, Artificial Sequence
  Description of Artificial Sequence: Synthetic oligonucleotide
  Target: ANGPTL4; (+) strand; PAM type: YTN; PAM sequence: CTG
taatcccagctactcgggag

SEQ ID NO: 16376 - DNA, 20 bp, Artificial Sequence
  Description of Artificial Sequence: Synthetic oligonucleotide
  Target: ANGPTL4; (+) strand; PAM type: YTN; PAM sequence: CTA
ctcgggaggctgaggcagga

SEQ ID NO: 16377 - DNA, 20 bp, Artificial Sequence
  Description of Artificial Sequence: Synthetic oligonucleotide
  Target: ANGPTL4; (+) strand; PAM type: YTN; PAM sequence: CTC
gggaggctgaggcaggagaa

SEQ ID NO: 16378 - DNA, 20 bp, Artificial Sequence
  Description of Artificial Sequence: Synthetic oligonucleotide
  Target: ANGPTL4; (+) strand; PAM type: YTN; PAM sequence: CTG
aggcaggagaatcatttgaa

SEQ ID NO: 16379 - DNA, 20 bp, Artificial Sequence
  Description of Artificial Sequence: Synthetic oligonucleotide
  Target: ANGPTL4; (+) strand; PAM type: YTN; PAM sequence: TTT
gaacccaggaggtggaagtt

SEQ ID NO: 16380 - DNA, 20 bp, Artificial Sequence
  Description of Artificial Sequence: Synthetic oligonucleotide
  Target: ANGPTL4; (+) strand; PAM type: YTN; PAM sequence: TTG
aacccaggaggtggaagttg

SEQ ID NO: 16381 - DNA, 20 bp, Artificial Sequence
  Description of Artificial Sequence: Synthetic oligonucleotide
  Target: ANGPTL4; (+) strand; PAM type: YTN; PAM sequence: TTG
cagtgagcagagattgcacc

SEQ ID NO: 16382 - DNA, 20 bp, Artificial Sequence
  Description of Artificial Sequence: Synthetic oligonucleotide
  Target: ANGPTL4; (+) strand; PAM type: YTN; PAM sequence: TTG
caccactgcactccagcctt

SEQ ID NO: 16383 - DNA, 20 bp, Artificial Sequence
  Description of Artificial Sequence: Synthetic oligonucleotide
  Target: ANGPTL4; (+) strand; PAM type: YTN; PAM sequence: CTG
cactccagccttggcgacag

SEQ ID NO: 16384 - DNA, 20 bp, Artificial Sequence
  Description of Artificial Sequence: Synthetic oligonucleotide
  Target: ANGPTL4; (+) strand; PAM type: YTN; PAM sequence: CTC
cagccttggcgacagagcaa

SEQ ID NO: 16385 - DNA, 20 bp, Artificial Sequence
  Description of Artificial Sequence: Synthetic oligonucleotide
  Target: ANGPTL4; (+) strand; PAM type: YTN; PAM sequence: CTT
ggcgacagagcaagactctg

SEQ ID NO: 16386 - DNA, 20 bp, Artificial Sequence
  Description of Artificial Sequence: Synthetic oligonucleotide
  Target: ANGPTL4; (+) strand; PAM type: YTN; PAM sequence: TTG
gcgacagagcaagactctgt

SEQ ID NO: 16387 - DNA, 20 bp, Artificial Sequence
  Description of Artificial Sequence: Synthetic oligonucleotide
  Target: ANGPTL4; (+) strand; PAM type: YTN; PAM sequence: CTC
tgtctcaaaaaaaagaaaaa

SEQ ID NO: 16388 - DNA, 20 bp, Artificial Sequence
  Description of Artificial Sequence: Synthetic oligonucleotide
  Target: ANGPTL4; (+) strand; PAM type: YTN; PAM sequence: CTG
tctcaaaaaaaagaaaaaaa

SEQ ID NO: 16389 - DNA, 20 bp, Artificial Sequence
  Description of Artificial Sequence: Synthetic oligonucleotide
  Target: ANGPTL4; (+) strand; PAM type: YTN; PAM sequence: CTC
aaaaaaaagaaaaaaaaaag

SEQ ID NO: 16390 - DNA, 20 bp, Artificial Sequence
  Description of Artificial Sequence: Synthetic oligonucleotide
  Target: ANGPTL4; (+) strand; PAM type: YTN; PAM sequence: TTG
gtcattttaacaatttttaa

SEQ ID NO: 16391 - DNA, 20 bp, Artificial Sequence
  Description of Artificial Sequence: Synthetic oligonucleotide
  Target: ANGPTL4; (+) strand; PAM type: YTN; PAM sequence: TTT
taacaatttttaactatgtt

SEQ ID NO: 16392 - DNA, 20 bp, Artificial Sequence
  Description of Artificial Sequence: Synthetic oligonucleotide
  Target: ANGPTL4; (+) strand; PAM type: YTN; PAM sequence: TTT
aacaatttttaactatgttg

SEQ ID NO: 16393 - DNA, 20 bp, Artificial Sequence
  Description of Artificial Sequence: Synthetic oligonucleotide
  Target: ANGPTL4; (+) strand; PAM type: YTN; PAM sequence: TTA
acaatttttaactatgttgg

SEQ ID NO: 16394 - DNA, 20 bp, Artificial Sequence
  Description of Artificial Sequence: Synthetic oligonucleotide
  Target: ANGPTL4; (+) strand; PAM type: YTN; PAM sequence: TTT
ttaactatgttggccaaagt

SEQ ID NO: 16395 - DNA, 20 bp, Artificial Sequence
  Description of Artificial Sequence: Synthetic oligonucleotide
  Target: ANGPTL4; (+) strand; PAM type: YTN; PAM sequence: TTT
taactatgttggccaaagta

SEQ ID NO: 16396 - DNA, 20 bp, Artificial Sequence
  Description of Artificial Sequence: Synthetic oligonucleotide
  Target: ANGPTL4; (+) strand; PAM type: YTN; PAM sequence: TTT
aactatgttggccaaagtag

SEQ ID NO: 16397 - DNA, 20 bp, Artificial Sequence
  Description of Artificial Sequence: Synthetic oligonucleotide
  Target: ANGPTL4; (+) strand; PAM type: YTN; PAM sequence: TTA
actatgttggccaaagtagc

SEQ ID NO: 16398 - DNA, 20 bp, Artificial Sequence
  Description of Artificial Sequence: Synthetic oligonucleotide
  Target: ANGPTL4; (+) strand; PAM type: YTN; PAM sequence: CTA
tgttggccaaagtagcccac

SEQ ID NO: 16399 - DNA, 20 bp, Artificial Sequence
  Description of Artificial Sequence: Synthetic oligonucleotide
  Target: ANGPTL4; (+) strand; PAM type: YTN; PAM sequence: TTG
gccaaagtagcccacgcgtt

SEQ ID NO: 16400 - DNA, 20 bp, Artificial Sequence
  Description of Artificial Sequence: Synthetic oligonucleotide
  Target: ANGPTL4; (+) strand; PAM type: YTN; PAM sequence: TTG
ggattggagacccggtcttg

SEQ ID NO: 16401 - DNA, 20 bp, Artificial Sequence
  Description of Artificial Sequence: Synthetic oligonucleotide
  Target: ANGPTL4; (+) strand; PAM type: YTN; PAM sequence: TTG
gagacccggtcttgcccacc

SEQ ID NO: 16402 - DNA, 20 bp, Artificial Sequence
  Description of Artificial Sequence: Synthetic oligonucleotide
  Target: ANGPTL4; (+) strand; PAM type: YTN; PAM sequence: CTT
gcccaccgtgatcgccccag

SEQ ID NO: 16403 - DNA, 20 bp, Artificial Sequence
  Description of Artificial Sequence: Synthetic oligonucleotide
  Target: ANGPTL4; (+) strand; PAM type: YTN; PAM sequence: TTG
cccaccgtgatcgccccagt

SEQ ID NO: 16404 - DNA, 20 bp, Artificial Sequence
  Description of Artificial Sequence: Synthetic oligonucleotide
  Target: ANGPTL4; (+) strand; PAM type: YTN; PAM sequence: CTG
gcatatagtaggtgctccag

SEQ ID NO: 16405 - DNA, 20 bp, Artificial Sequence
  Description of Artificial Sequence: Synthetic oligonucleotide
  Target: ANGPTL4; (+) strand; PAM type: YTN; PAM sequence: CTC
caggaacaattgatcaggat

SEQ ID NO: 16406 - DNA, 20 bp, Artificial Sequence
  Description of Artificial Sequence: Synthetic oligonucleotide
  Target: ANGPTL4; (+) strand; PAM type: YTN; PAM sequence: TTG
atcaggatgactttgtcttt

SEQ ID NO: 16407 - DNA, 20 bp, Artificial Sequence
  Description of Artificial Sequence: Synthetic oligonucleotide
  Target: ANGPTL4; (+) strand; PAM type: YTN; PAM sequence: CTT
tgtctttgctgggtaagagg

SEQ ID NO: 16408 - DNA, 20 bp, Artificial Sequence
  Description of Artificial Sequence: Synthetic oligonucleotide
  Target: ANGPTL4; (+) strand; PAM type: YTN; PAM sequence: TTT
gtctttgctgggtaagaggc

SEQ ID NO: 16409 - DNA, 20 bp, Artificial Sequence
  Description of Artificial Sequence: Synthetic oligonucleotide
  Target: ANGPTL4; (+) strand; PAM type: YTN; PAM sequence: TTG
tctttgctgggtaagaggcc

SEQ ID NO: 16410 - DNA, 20 bp, Artificial Sequence
  Description of Artificial Sequence: Synthetic oligonucleotide
  Target: ANGPTL4; (+) strand; PAM type: YTN; PAM sequence: CTT
tgctgggtaagaggccacat

SEQ ID NO: 16411 - DNA, 20 bp, Artificial Sequence
  Description of Artificial Sequence: Synthetic oligonucleotide
  Target: ANGPTL4; (+) strand; PAM type: YTN; PAM sequence: TTT
gctgggtaagaggccacatt

SEQ ID NO: 16412 - DNA, 20 bp, Artificial Sequence
  Description of Artificial Sequence: Synthetic oligonucleotide
  Target: ANGPTL4; (+) strand; PAM type: YTN; PAM sequence: TTG
ctgggtaagaggccacattc

SEQ ID NO: 16413 - DNA, 20 bp, Artificial Sequence
  Description of Artificial Sequence: Synthetic oligonucleotide
  Target: ANGPTL4; (+) strand; PAM type: YTN; PAM sequence: CTG
ggtaagaggccacattctaa

SEQ ID NO: 16414 - DNA, 20 bp, Artificial Sequence
  Description of Artificial Sequence: Synthetic oligonucleotide
  Target: ANGPTL4; (+) strand; PAM type: YTN; PAM sequence: TTC
taaaggtcagtttttggcca

SEQ ID NO: 16415 - DNA, 20 bp, Artificial Sequence
  Description of Artificial Sequence: Synthetic oligonucleotide
  Target: ANGPTL4; (+) strand; PAM type: YTN; PAM sequence: CTA
aaggtcagtttttggccagg

SEQ ID NO: 16416 - DNA, 20 bp, Artificial Sequence
  Description of Artificial Sequence: Synthetic oligonucleotide
  Target: ANGPTL4; (+) strand; PAM type: YTN; PAM sequence: TTT
ttggccaggcacagtgactc

SEQ ID NO: 16417 - DNA, 20 bp, Artificial Sequence
  Description of Artificial Sequence: Synthetic oligonucleotide
  Target: ANGPTL4; (+) strand; PAM type: YTN; PAM sequence: TTT
tggccaggcacagtgactca

SEQ ID NO: 16418 - DNA, 20 bp, Artificial Sequence
  Description of Artificial Sequence: Synthetic oligonucleotide
  Target: ANGPTL4; (+) strand; PAM type: YTN; PAM sequence: TTT
ggccaggcacagtgactcac

SEQ ID NO: 16419 - DNA, 20 bp, Artificial Sequence
  Description of Artificial Sequence: Synthetic oligonucleotide
  Target: ANGPTL4; (+) strand; PAM type: YTN; PAM sequence: TTG
gccaggcacagtgactcaca

SEQ ID NO: 16420 - DNA, 20 bp, Artificial Sequence
  Description of Artificial Sequence: Synthetic oligonucleotide
  Target: ANGPTL4; (+) strand; PAM type: YTN; PAM sequence: CTC
acacctgtcatcccagcact

SEQ ID NO: 16421 - DNA, 20 bp, Artificial Sequence
  Description of Artificial Sequence: Synthetic oligonucleotide
  Target: ANGPTL4; (+) strand; PAM type: YTN; PAM sequence: CTG
tcatcccagcactttgggag

SEQ ID NO: 16422 - DNA, 20 bp, Artificial Sequence
  Description of Artificial Sequence: Synthetic oligonucleotide
  Target: ANGPTL4; (+) strand; PAM type: YTN; PAM sequence: CTT
tgggaggccgaggcgagtga

SEQ ID NO: 16423 - DNA, 20 bp, Artificial Sequence
  Description of Artificial Sequence: Synthetic oligonucleotide
  Target: ANGPTL4; (+) strand; PAM type: YTN; PAM sequence: TTT
gggaggccgaggcgagtgaa

SEQ ID NO: 16424 - DNA, 20 bp, Artificial Sequence
  Description of Artificial Sequence: Synthetic oligonucleotide
  Target: ANGPTL4; (+) strand; PAM type: YTN; PAM sequence: TTG
ggaggccgaggcgagtgaat

SEQ ID NO: 16425 - DNA, 20 bp, Artificial Sequence
  Description of Artificial Sequence: Synthetic oligonucleotide
  Target: ANGPTL4; (+) strand; PAM type: YTN; PAM sequence: CTT
gagctcaggagttcaagacc

SEQ ID NO: 16426 - DNA, 20 bp, Artificial Sequence
  Description of Artificial Sequence: Synthetic oligonucleotide
  Target: ANGPTL4; (+) strand; PAM type: YTN; PAM sequence: TTG
agctcaggagttcaagacca

SEQ ID NO: 16427 - DNA, 20 bp, Artificial Sequence
  Description of Artificial Sequence: Synthetic oligonucleotide
  Target: ANGPTL4; (+) strand; PAM type: YTN; PAM sequence: CTC
aggagttcaagaccagcctg

SEQ ID NO: 16428 - DNA, 20 bp, Artificial Sequence
  Description of Artificial Sequence: Synthetic oligonucleotide
  Target: ANGPTL4; (+) strand; PAM type: YTN; PAM sequence: TTC
aagaccagcctgggcaacac

SEQ ID NO: 16429 - DNA, 20 bp, Artificial Sequence
  Description of Artificial Sequence: Synthetic oligonucleotide
  Target: ANGPTL4; (+) strand; PAM type: YTN; PAM sequence: CTG
ggcaacacggcaaaaatcct

SEQ ID NO: 16430 - DNA, 20 bp, Artificial Sequence
  Description of Artificial Sequence: Synthetic oligonucleotide
  Target: ANGPTL4; (+) strand; PAM type: YTN; PAM sequence: CTG
tctctacaaaatctacagaa

SEQ ID NO: 16431 - DNA, 20 bp, Artificial Sequence
  Description of Artificial Sequence: Synthetic oligonucleotide
  Target: ANGPTL4; (+) strand; PAM type: YTN; PAM sequence: CTC
tacaaaatctacagaaatta

SEQ ID NO: 16432 - DNA, 20 bp, Artificial Sequence
  Description of Artificial Sequence: Synthetic oligonucleotide
  Target: ANGPTL4; (+) strand; PAM type: YTN; PAM sequence: CTA
caaaatctacagaaattagg

SEQ ID NO: 16433 - DNA, 20 bp, Artificial Sequence
  Description of Artificial Sequence: Synthetic oligonucleotide
  Target: ANGPTL4; (+) strand; PAM type: YTN; PAM sequence: CTA
cagaaattaggcaggtctgg

SEQ ID NO: 16434 - DNA, 20 bp, Artificial Sequence
  Description of Artificial Sequence: Synthetic oligonucleotide
  Target: ANGPTL4; (+) strand; PAM type: YTN; PAM sequence: TTA
ggcaggtctggtggcacatg

SEQ ID NO: 16435 - DNA, 20 bp, Artificial Sequence
  Description of Artificial Sequence: Synthetic oligonucleotide
  Target: ANGPTL4; (+) strand; PAM type: YTN; PAM sequence: CTG
gtggcacatgcctatagtcc

SEQ ID NO: 16436 - DNA, 20 bp, Artificial Sequence
  Description of Artificial Sequence: Synthetic oligonucleotide
  Target: ANGPTL4; (+) strand; PAM type: YTN; PAM sequence: CTA
tagtcccagctgcttgggag

SEQ ID NO: 16437 - DNA, 20 bp, Artificial Sequence
  Description of Artificial Sequence: Synthetic oligonucleotide
  Target: ANGPTL4; (+) strand; PAM type: YTN; PAM sequence: CTG
cttgggaggctgaggtggga

SEQ ID NO: 16438 - DNA, 20 bp, Artificial Sequence
  Description of Artificial Sequence: Synthetic oligonucleotide
  Target: ANGPTL4; (+) strand; PAM type: YTN; PAM sequence: CTT
gggaggctgaggtgggagga

SEQ ID NO: 16439 - DNA, 20 bp, Artificial Sequence
  Description of Artificial Sequence: Synthetic oligonucleotide
  Target: ANGPTL4; (+) strand; PAM type: YTN; PAM sequence: TTG
ggaggctgaggtgggaggat

SEQ ID NO: 16440 - DNA, 20 bp, Artificial Sequence
  Description of Artificial Sequence: Synthetic oligonucleotide
  Target: ANGPTL4; (+) strand; PAM type: YTN; PAM sequence: CTG
aggtgggaggatcacttgag

SEQ ID NO: 16441 - DNA, 20 bp, Artificial Sequence
  Description of Artificial Sequence: Synthetic oligonucleotide
  Target: ANGPTL4; (+) strand; PAM type: YTN; PAM sequence: CTT
gagcctgggagtttgaggtt

SEQ ID NO: 16442 - DNA, 20 bp, Artificial Sequence
  Description of Artificial Sequence: Synthetic oligonucleotide
  Target: ANGPTL4; (+) strand; PAM type: YTN; PAM sequence: TTG
agcctgggagtttgaggttg

SEQ ID NO: 16443 - DNA, 20 bp, Artificial Sequence
  Description of Artificial Sequence: Synthetic oligonucleotide
  Target: ANGPTL4; (+) strand; PAM type: YTN; PAM sequence: CTG
ggagtttgaggttgcggtga

SEQ ID NO: 16444 - DNA, 20 bp, Artificial Sequence
  Description of Artificial Sequence: Synthetic oligonucleotide
  Target: ANGPTL4; (+) strand; PAM type: YTN; PAM sequence: TTT
gaggttgcggtgagctgtga

SEQ ID NO: 16445 - DNA, 20 bp, Artificial Sequence
  Description of Artificial Sequence: Synthetic oligonucleotide
  Target: ANGPTL4; (+) strand; PAM type: YTN; PAM sequence: TTG
aggttgcggtgagctgtgat

SEQ ID NO: 16446 - DNA, 20 bp, Artificial Sequence
  Description of Artificial Sequence: Synthetic oligonucleotide
  Target: ANGPTL4; (+) strand; PAM type: YTN; PAM sequence: TTG
cggtgagctgtgattgtgac

SEQ ID NO: 16447 - DNA, 20 bp, Artificial Sequence
  Description of Artificial Sequence: Synthetic oligonucleotide
  Target: ANGPTL4; (+) strand; PAM type: YTN; PAM sequence: CTG
tgattgtgacactgcactcc

SEQ ID NO: 16448 - DNA, 20 bp, Artificial Sequence
  Description of Artificial Sequence: Synthetic oligonucleotide
  Target: ANGPTL4; (+) strand; PAM type: YTN; PAM sequence: TTG
tgacactgcactccagcctg

SEQ ID NO: 16449 - DNA, 20 bp, Artificial Sequence
  Description of Artificial Sequence: Synthetic oligonucleotide
  Target: ANGPTL4; (+) strand; PAM type: YTN; PAM sequence: CTG
cactccagcctgggtgagtg

SEQ ID NO: 16450 - DNA, 20 bp, Artificial Sequence
  Description of Artificial Sequence: Synthetic oligonucleotide
  Target: ANGPTL4; (+) strand; PAM type: YTN; PAM sequence: CTC
cagcctgggtgagtgagacc

SEQ ID NO: 16451 - DNA, 20 bp, Artificial Sequence
  Description of Artificial Sequence: Synthetic oligonucleotide
  Target: ANGPTL4; (+) strand; PAM type: YTN; PAM sequence: CTG
ggtgagtgagacccatctca

SEQ ID NO: 16452 - DNA, 20 bp, Artificial Sequence
  Description of Artificial Sequence: Synthetic oligonucleotide
  Target: ANGPTL4; (+) strand; PAM type: YTN; PAM sequence: CTC
agaaaaaaaaaaaaaaatac

SEQ ID NO: 16453 - DNA, 20 bp, Artificial Sequence
  Description of Artificial Sequence: Synthetic oligonucleotide
  Target: ANGPTL4; (+) strand; PAM type: YTN; PAM sequence: CTG
ggcgtggtggctcatgcctg

SEQ ID NO: 16454 - DNA, 20 bp, Artificial Sequence
  Description of Artificial Sequence: Synthetic oligonucleotide
  Target: ANGPTL4; (+) strand; PAM type: YTN; PAM sequence: CTC
atgcctgtaatcctagcact

SEQ ID NO: 16455 - DNA, 20 bp, Artificial Sequence
  Description of Artificial Sequence: Synthetic oligonucleotide
  Target: ANGPTL4; (+) strand; PAM type: YTN; PAM sequence: CTG
taatcctagcactttgggag

SEQ ID NO: 16456 - DNA, 20 bp, Artificial Sequence
  Description of Artificial Sequence: Synthetic oligonucleotide
  Target: ANGPTL4; (+) strand; PAM type: YTN; PAM sequence: CTA
gcactttgggaggctgaggt

SEQ ID NO: 16457 - DNA, 20 bp, Artificial Sequence
  Description of Artificial Sequence: Synthetic oligonucleotide
  Target: ANGPTL4; (+) strand; PAM type: YTN; PAM sequence: CTT
tgggaggctgaggtggtgga

SEQ ID NO: 16458 - DNA, 20 bp, Artificial Sequence
  Description of Artificial Sequence: Synthetic oligonucleotide
  Target: ANGPTL4; (+) strand; PAM type: YTN; PAM sequence: TTT
gggaggctgaggtggtggat

SEQ ID NO: 16459 - DNA, 20 bp, Artificial Sequence
  Description of Artificial Sequence: Synthetic oligonucleotide
  Target: ANGPTL4; (+) strand; PAM type: YTN; PAM sequence: TTG
ggaggctgaggtggtggata

SEQ ID NO: 16460 - DNA, 20 bp, Artificial Sequence
  Description of Artificial Sequence: Synthetic oligonucleotide
  Target: ANGPTL4; (+) strand; PAM type: YTN; PAM sequence: CTG
aggtggtggatagcctaagc

SEQ ID NO: 16461 - DNA, 20 bp, Artificial Sequence
  Description of Artificial Sequence: Synthetic oligonucleotide
  Target: ANGPTL4; (+) strand; PAM type: YTN; PAM sequence: CTA
agcttaggagtttgagacca

SEQ ID NO: 16462 - DNA, 20 bp, Artificial Sequence
  Description of Artificial Sequence: Synthetic oligonucleotide
  Target: ANGPTL4; (+) strand; PAM type: YTN; PAM sequence: CTT
aggagtttgagaccagcctg

SEQ ID NO: 16463 - DNA, 20 bp, Artificial Sequence
  Description of Artificial Sequence: Synthetic oligonucleotide
  Target: ANGPTL4; (+) strand; PAM type: YTN; PAM sequence: TTA
ggagtttgagaccagcctgg

SEQ ID NO: 16464 - DNA, 20 bp, Artificial Sequence
  Description of Artificial Sequence: Synthetic oligonucleotide
  Target: ANGPTL4; (+) strand; PAM type: YTN; PAM sequence: TTT
gagaccagcctgggcaacat

SEQ ID NO: 16465 - DNA, 20 bp, Artificial Sequence
  Description of Artificial Sequence: Synthetic oligonucleotide
  Target: ANGPTL4; (+) strand; PAM type: YTN; PAM sequence: TTG
agaccagcctgggcaacatg

SEQ ID NO: 16466 - DNA, 20 bp, Artificial Sequence
  Description of Artificial Sequence: Synthetic oligonucleotide
  Target: ANGPTL4; (+) strand; PAM type: YTN; PAM sequence: CTG
ggcaacatggcgaaacccca

SEQ ID NO: 16467 - DNA, 20 bp, Artificial Sequence
  Description of Artificial Sequence: Synthetic oligonucleotide
  Target: ANGPTL4; (+) strand; PAM type: YTN; PAM sequence: CTC
tactagaatacaaaaaatta

SEQ ID NO: 16468 - DNA, 20 bp, Artificial Sequence
  Description of Artificial Sequence: Synthetic oligonucleotide
  Target: ANGPTL4; (+) strand; PAM type: YTN; PAM sequence: CTA
ctagaatacaaaaaattagc

SEQ ID NO: 16469 - DNA, 20 bp, Artificial Sequence
  Description of Artificial Sequence: Synthetic oligonucleotide
  Target: ANGPTL4; (+) strand; PAM type: YTN; PAM sequence: CTA
gaatacaaaaaattagcggg

SEQ ID NO: 16470 - DNA, 20 bp, Artificial Sequence
  Description of Artificial Sequence: Synthetic oligonucleotide
  Target: ANGPTL4; (+) strand; PAM type: YTN; PAM sequence: TTA
gcgggcgtggtggtgggcac

SEQ ID NO: 16471 - DNA, 20 bp, Artificial Sequence
  Description of Artificial Sequence: Synthetic oligonucleotide
  Target: ANGPTL4; (+) strand; PAM type: YTN; PAM sequence: CTG
tagtcccagctactcaggag

SEQ ID NO: 16472 - DNA, 20 bp, Artificial Sequence
  Description of Artificial Sequence: Synthetic oligonucleotide
  Target: ANGPTL4; (+) strand; PAM type: YTN; PAM sequence: CTA
ctcaggaggctgaggcagga

SEQ ID NO: 16473 - DNA, 20 bp, Artificial Sequence
  Description of Artificial Sequence: Synthetic oligonucleotide
  Target: ANGPTL4; (+) strand; PAM type: YTN; PAM sequence: CTC
aggaggctgaggcaggagaa

SEQ ID NO: 16474 - DNA, 20 bp, Artificial Sequence
  Description of Artificial Sequence: Synthetic oligonucleotide
  Target: ANGPTL4; (+) strand; PAM type: YTN; PAM sequence: CTG
aggcaggagaatggcgggaa

SEQ ID NO: 16475 - DNA, 20 bp, Artificial Sequence
  Description of Artificial Sequence: Synthetic oligonucleotide
  Target: ANGPTL4; (+) strand; PAM type: YTN; PAM sequence: CTG
ggaggtggagcttgcagtga

SEQ ID NO: 16476 - DNA, 20 bp, Artificial Sequence
  Description of Artificial Sequence: Synthetic oligonucleotide
  Target: ANGPTL4; (+) strand; PAM type: YTN; PAM sequence: CTT
gcagtgagccgagatgaggc

SEQ ID NO: 16477 - DNA, 20 bp, Artificial Sequence
  Description of Artificial Sequence: Synthetic oligonucleotide
  Target: ANGPTL4; (+) strand; PAM type: YTN; PAM sequence: TTG
cagtgagccgagatgaggcc

SEQ ID NO: 16478 - DNA, 20 bp, Artificial Sequence
  Description of Artificial Sequence: Synthetic oligonucleotide
  Target: ANGPTL4; (+) strand; PAM type: YTN; PAM sequence: CTG
cactccagcctgggcaacag

SEQ ID NO: 16479 - DNA, 20 bp, Artificial Sequence
  Description of Artificial Sequence: Synthetic oligonucleotide
  Target: ANGPTL4; (+) strand; PAM type: YTN; PAM sequence: CTC
cagcctgggcaacagagcaa

SEQ ID NO: 16480 - DNA, 20 bp, Artificial Sequence
  Description of Artificial Sequence: Synthetic oligonucleotide
  Target: ANGPTL4; (+) strand; PAM type: YTN; PAM sequence: CTG
ggcaacagagcaagactctg

SEQ ID NO: 16481 - DNA, 20 bp, Artificial Sequence
  Description of Artificial Sequence: Synthetic oligonucleotide
  Target: ANGPTL4; (+) strand; PAM type: YTN; PAM sequence: CTC
tgtctcaaaaaaaaaaaaaa

SEQ ID NO: 16482 - DNA, 20 bp, Artificial Sequence
  Description of Artificial Sequence: Synthetic oligonucleotide
  Target: ANGPTL4; (+) strand; PAM type: YTN; PAM sequence: CTG
tctcaaaaaaaaaaaaaaaa

SEQ ID NO: 16483 - DNA, 20 bp, Artificial Sequence
  Description of Artificial Sequence: Synthetic oligonucleotide
  Target: ANGPTL4; (+) strand; PAM type: YTN; PAM sequence: CTC
aaaaaaaaaaaaaaaaaaaa

SEQ ID NO: 16484 - DNA, 20 bp, Artificial Sequence
  Description of Artificial Sequence: Synthetic oligonucleotide
  Target: ANGPTL4; (+) strand; PAM type: YTN; PAM sequence: CTA
ggccaggcacagtggctcac

SEQ ID NO: 16485 - DNA, 20 bp, Artificial Sequence
  Description of Artificial Sequence: Synthetic oligonucleotide
  Target: ANGPTL4; (+) strand; PAM type: YTN; PAM sequence: CTC
acacctgtaatcccagcacg

SEQ ID NO: 16486 - DNA, 20 bp, Artificial Sequence
  Description of Artificial Sequence: Synthetic oligonucleotide
  Target: ANGPTL4; (+) strand; PAM type: YTN; PAM sequence: CTG
taatcccagcacgttgggag

SEQ ID NO: 16487 - DNA, 20 bp, Artificial Sequence
  Description of Artificial Sequence: Synthetic oligonucleotide
  Target: ANGPTL4; (+) strand; PAM type: YTN; PAM sequence: TTG
ggaggccgagacaggtggat

SEQ ID NO: 16488 - DNA, 20 bp, Artificial Sequence
  Description of Artificial Sequence: Synthetic oligonucleotide
  Target: ANGPTL4; (+) strand; PAM type: YTN; PAM sequence: CTG
aggtcaggaatttgagacca

SEQ ID NO: 16489 - DNA, 20 bp, Artificial Sequence
  Description of Artificial Sequence: Synthetic oligonucleotide
  Target: ANGPTL4; (+) strand; PAM type: YTN; PAM sequence: TTT
gagaccagcagagccaacat

SEQ ID NO: 16490 - DNA, 20 bp, Artificial Sequence
  Description of Artificial Sequence: Synthetic oligonucleotide
  Target: ANGPTL4; (+) strand; PAM type: YTN; PAM sequence: TTG
agaccagcagagccaacata

SEQ ID NO: 16491 - DNA, 20 bp, Artificial Sequence
  Description of Artificial Sequence: Synthetic oligonucleotide
  Target: ANGPTL4; (+) strand; PAM type: YTN; PAM sequence: TTT
gcactaaaaatacaaaaaat

SEQ ID NO: 16492 - DNA, 20 bp, Artificial Sequence
  Description of Artificial Sequence: Synthetic oligonucleotide
  Target: ANGPTL4; (+) strand; PAM type: YTN; PAM sequence: TTG
cactaaaaatacaaaaaatt

SEQ ID NO: 16493 - DNA, 20 bp, Artificial Sequence
  Description of Artificial Sequence: Synthetic oligonucleotide
  Target: ANGPTL4; (+) strand; PAM type: YTN; PAM sequence: CTA
aaaatacaaaaaattagtca

SEQ ID NO: 16494 - DNA, 20 bp, Artificial Sequence
  Description of Artificial Sequence: Synthetic oligonucleotide
  Target: ANGPTL4; (+) strand; PAM type: YTN; PAM sequence: TTA
gtcaggtgtggtggtgcaca

SEQ ID NO: 16495 - DNA, 20 bp, Artificial Sequence
  Description of Artificial Sequence: Synthetic oligonucleotide
  Target: ANGPTL4; (+) strand; PAM type: YTN; PAM sequence: CTG
taatccccgctactcgggag

SEQ ID NO: 16496 - DNA, 20 bp, Artificial Sequence
  Description of Artificial Sequence: Synthetic oligonucleotide
  Target: ANGPTL4; (+) strand; PAM type: YTN; PAM sequence: CTA
ctcgggaggctgaggctgga

SEQ ID NO: 16497 - DNA, 20 bp, Artificial Sequence
  Description of Artificial Sequence: Synthetic oligonucleotide
  Target: ANGPTL4; (+) strand; PAM type: YTN; PAM sequence: CTC
gggaggctgaggctggagaa

SEQ ID NO: 16498 - DNA, 20 bp, Artificial Sequence
  Description of Artificial Sequence: Synthetic oligonucleotide
  Target: ANGPTL4; (+) strand; PAM type: YTN; PAM sequence: CTG
aggctggagaatcgcttgaa

SEQ ID NO: 16499 - DNA, 20 bp, Artificial Sequence
  Description of Artificial Sequence: Synthetic oligonucleotide
  Target: ANGPTL4; (+) strand; PAM type: YTN; PAM sequence: CTG
gagaatcgcttgaacctggg

SEQ ID NO: 16500 - DNA, 20 bp, Artificial Sequence
  Description of Artificial Sequence: Synthetic oligonucleotide
  Target: ANGPTL4; (+) strand; PAM type: YTN; PAM sequence: CTT
gaacctgggaggcagaggtt

SEQ ID NO: 16501 - DNA, 20 bp, Artificial Sequence
  Description of Artificial Sequence: Synthetic oligonucleotide
  Target: ANGPTL4; (+) strand; PAM type: YTN; PAM sequence: TTG
aacctgggaggcagaggttg

SEQ ID NO: 16502 - DNA, 20 bp, Artificial Sequence
  Description of Artificial Sequence: Synthetic oligonucleotide
  Target: ANGPTL4; (+) strand; PAM type: YTN; PAM sequence: CTG
ggaggcagaggttgcagtga

SEQ ID NO: 16503 - DNA, 20 bp, Artificial Sequence
  Description of Artificial Sequence: Synthetic oligonucleotide
  Target: ANGPTL4; (+) strand; PAM type: YTN; PAM sequence: TTG
cagtgagcggagattgcgcc

SEQ ID NO: 16504 - DNA, 20 bp, Artificial Sequence
  Description of Artificial Sequence: Synthetic oligonucleotide
  Target: ANGPTL4; (+) strand; PAM type: YTN; PAM sequence: TTG
cgccgttgcactccagcctg

SEQ ID NO: 16505 - DNA, 20 bp, Artificial Sequence
  Description of Artificial Sequence: Synthetic oligonucleotide
  Target: ANGPTL4; (+) strand; PAM type: YTN; PAM sequence: TTG
cactccagcctgggcgacaa

SEQ ID NO: 16506 - DNA, 20 bp, Artificial Sequence
  Description of Artificial Sequence: Synthetic oligonucleotide
  Target: ANGPTL4; (+) strand; PAM type: YTN; PAM sequence: CTC
cagcctgggcgacaagaggg

SEQ ID NO: 16507 - DNA, 20 bp, Artificial Sequence
  Description of Artificial Sequence: Synthetic oligonucleotide
  Target: ANGPTL4; (+) strand; PAM type: YTN; PAM sequence: CTG
ggcgacaagagggaaactcc

SEQ ID NO: 16508 - DNA, 20 bp, Artificial Sequence
  Description of Artificial Sequence: Synthetic oligonucleotide
  Target: ANGPTL4; (+) strand; PAM type: YTN; PAM sequence: CTC
catctcaaaaaaataaataa

SEQ ID NO: 16509 - DNA, 20 bp, Artificial Sequence
  Description of Artificial Sequence: Synthetic oligonucleotide
  Target: ANGPTL4; (+) strand; PAM type: YTN; PAM sequence: CTC
aaaaaaataaataaataaaa

SEQ ID NO: 16510 - DNA, 20 bp, Artificial Sequence
  Description of Artificial Sequence: Synthetic oligonucleotide
  Target: ANGPTL4; (+) strand; PAM type: YTN; PAM sequence: CTG
ggcgcggtggctcatgcctg

SEQ ID NO: 16511 - DNA, 20 bp, Artificial Sequence
  Description of Artificial Sequence: Synthetic oligonucleotide
  Target: ANGPTL4; (+) strand; PAM type: YTN; PAM sequence: CTC
atgcctgtaatcccagcact

SEQ ID NO: 16512 - DNA, 20 bp, Artificial Sequence
  Description of Artificial Sequence: Synthetic oligonucleotide
  Target: ANGPTL4; (+) strand; PAM type: YTN; PAM sequence: CTG
taatcccagcactttgggag

SEQ ID NO: 16513 - DNA, 20 bp, Artificial Sequence
  Description of Artificial Sequence: Synthetic oligonucleotide
  Target: ANGPTL4; (+) strand; PAM type: YTN; PAM sequence: CTT
tgggaggccgaagcgggcgg

SEQ ID NO: 16514 - DNA, 20 bp, Artificial Sequence
  Description of Artificial Sequence: Synthetic oligonucleotide
  Target: ANGPTL4; (+) strand; PAM type: YTN; PAM sequence: TTT
gggaggccgaagcgggcgga

SEQ ID NO: 16515 - DNA, 20 bp, Artificial Sequence
  Description of Artificial Sequence: Synthetic oligonucleotide
  Target: ANGPTL4; (+) strand; PAM type: YTN; PAM sequence: TTG
ggaggccgaagcgggcggat

SEQ ID NO: 16516 - DNA, 20 bp, Artificial Sequence
  Description of Artificial Sequence: Synthetic oligonucleotide
  Target: ANGPTL4; (+) strand; PAM type: YTN; PAM sequence: CTG
gctaacatggtgaaaccctg

SEQ ID NO: 16517 - DNA, 20 bp, Artificial Sequence
  Description of Artificial Sequence: Synthetic oligonucleotide
  Target: ANGPTL4; (+) strand; PAM type: YTN; PAM sequence: CTA
acatggtgaaaccctgtctc

SEQ ID NO: 16518 - DNA, 20 bp, Artificial Sequence
  Description of Artificial Sequence: Synthetic oligonucleotide
  Target: ANGPTL4; (+) strand; PAM type: YTN; PAM sequence: CTG
tctctattaaaaatacaaaa

SEQ ID NO: 16519 - DNA, 20 bp, Artificial Sequence
  Description of Artificial Sequence: Synthetic oligonucleotide
  Target: ANGPTL4; (+) strand; PAM type: YTN; PAM sequence: CTC
tattaaaaatacaaaaaatt

SEQ ID NO: 16520 - DNA, 20 bp, Artificial Sequence
  Description of Artificial Sequence: Synthetic oligonucleotide
  Target: ANGPTL4; (+) strand; PAM type: YTN; PAM sequence: CTA
ttaaaaatacaaaaaattag

SEQ ID NO: 16521 - DNA, 20 bp, Artificial Sequence
  Description of Artificial Sequence: Synthetic oligonucleotide
  Target: ANGPTL4; (+) strand; PAM type: YTN; PAM sequence: TTA
aaaatacaaaaaattagctg

SEQ ID NO: 16522 - DNA, 20 bp, Artificial Sequence
  Description of Artificial Sequence: Synthetic oligonucleotide
  Target: ANGPTL4; (+) strand; PAM type: YTN; PAM sequence: TTA
gctgggcatggtggcaggtg

SEQ ID NO: 16523 - DNA, 20 bp, Artificial Sequence
  Description of Artificial Sequence: Synthetic oligonucleotide
  Target: ANGPTL4; (+) strand; PAM type: YTN; PAM sequence: CTG
ggcatggtggcaggtgcctg

SEQ ID NO: 16524 - DNA, 20 bp, Artificial Sequence
  Description of Artificial Sequence: Synthetic oligonucleotide
  Target: ANGPTL4; (+) strand; PAM type: YTN; PAM sequence: CTG
tagtcccagctactcgggag

SEQ ID NO: 16525 - DNA, 20 bp, Artificial Sequence
  Description of Artificial Sequence: Synthetic oligonucleotide
  Target: ANGPTL4; (+) strand; PAM type: YTN; PAM sequence: CTA
ctcgggaggctgaggcagga

SEQ ID NO: 16526 - DNA, 20 bp, Artificial Sequence
  Description of Artificial Sequence: Synthetic oligonucleotide
  Target: ANGPTL4; (+) strand; PAM type: YTN; PAM sequence: CTC
gggaggctgaggcaggagaa

SEQ ID NO: 16527 - DNA, 20 bp, Artificial Sequence
  Description of Artificial Sequence: Synthetic oligonucleotide
  Target: ANGPTL4; (+) strand; PAM type: YTN; PAM sequence: CTG
aggcaggagaatggcactaa

SEQ ID NO: 16528 - DNA, 20 bp, Artificial Sequence
  Description of Artificial Sequence: Synthetic oligonucleotide
  Target: ANGPTL4; (+) strand; PAM type: YTN; PAM sequence: CTA
acccgggaggtggagcttgc

SEQ ID NO: 16529 - DNA, 20 bp, Artificial Sequence
  Description of Artificial Sequence: Synthetic oligonucleotide
  Target: ANGPTL4; (+) strand; PAM type: YTN; PAM sequence: CTT
gcagtgagccgagattgcgc

SEQ ID NO: 16530 - DNA, 20 bp, Artificial Sequence
  Description of Artificial Sequence: Synthetic oligonucleotide
  Target: ANGPTL4; (+) strand; PAM type: YTN; PAM sequence: TTG
cagtgagccgagattgcgcc

SEQ ID NO: 16531 - DNA, 20 bp, Artificial Sequence
  Description of Artificial Sequence: Synthetic oligonucleotide
  Target: ANGPTL4; (+) strand; PAM type: YTN; PAM sequence: TTG
cgccactgcactccagcgtg

SEQ ID NO: 16532 - DNA, 20 bp, Artificial Sequence
  Description of Artificial Sequence: Synthetic oligonucleotide
  Target: ANGPTL4; (+) strand; PAM type: YTN; PAM sequence: CTG
cactccagcgtgggcgacag

SEQ ID NO: 16533 - DNA, 20 bp, Artificial Sequence
  Description of Artificial Sequence: Synthetic oligonucleotide
  Target: ANGPTL4; (+) strand; PAM type: YTN; PAM sequence: CTC
cagcgtgggcgacagagcga

SEQ ID NO: 16534 - DNA, 20 bp, Artificial Sequence
  Description of Artificial Sequence: Synthetic oligonucleotide
  Target: ANGPTL4; (+) strand; PAM type: YTN; PAM sequence: CTC
cttctcaaaaaataaataaa

SEQ ID NO: 16535 - DNA, 20 bp, Artificial Sequence
  Description of Artificial Sequence: Synthetic oligonucleotide
  Target: ANGPTL4; (+) strand; PAM type: YTN; PAM sequence: CTT
ctcaaaaaataaataaataa

SEQ ID NO: 16536 - DNA, 20 bp, Artificial Sequence
  Description of Artificial Sequence: Synthetic oligonucleotide
  Target: ANGPTL4; (+) strand; PAM type: YTN; PAM sequence: TTC
tcaaaaaataaataaataaa

SEQ ID NO: 16537 - DNA, 20 bp, Artificial Sequence
  Description of Artificial Sequence: Synthetic oligonucleotide
  Target: ANGPTL4; (+) strand; PAM type: YTN; PAM sequence: CTC
aaaaaataaataaataaata

SEQ ID NO: 16538 - DNA, 20 bp, Artificial Sequence
  Description of Artificial Sequence: Synthetic oligonucleotide
  Target: ANGPTL4; (+) strand; PAM type: YTN; PAM sequence: TTT
ttagaataaaatctagagcc

SEQ ID NO: 16539 - DNA, 20 bp, Artificial Sequence
  Description of Artificial Sequence: Synthetic oligonucleotide
  Target: ANGPTL4; (+) strand; PAM type: YTN; PAM sequence: TTT
tagaataaaatctagagcca

SEQ ID NO: 16540 - DNA, 20 bp, Artificial Sequence
  Description of Artificial Sequence: Synthetic oligonucleotide
  Target: ANGPTL4; (+) strand; PAM type: YTN; PAM sequence: TTT
agaataaaatctagagccaa

SEQ ID NO: 16541 - DNA, 20 bp, Artificial Sequence
  Description of Artificial Sequence: Synthetic oligonucleotide
  Target: ANGPTL4; (+) strand; PAM type: YTN; PAM sequence: TTA
gaataaaatctagagccaac

SEQ ID NO: 16542 - DNA, 20 bp, Artificial Sequence
  Description of Artificial Sequence: Synthetic oligonucleotide
  Target: ANGPTL4; (+) strand; PAM type: YTN; PAM sequence: CTA
gagccaacttgaggcgacag

SEQ ID NO: 16543 - DNA, 20 bp, Artificial Sequence
  Description of Artificial Sequence: Synthetic oligonucleotide
  Target: ANGPTL4; (+) strand; PAM type: YTN; PAM sequence: CTT
gaggcgacagtatagactct

SEQ ID NO: 16544 - DNA, 20 bp, Artificial Sequence
  Description of Artificial Sequence: Synthetic oligonucleotide
  Target: ANGPTL4; (+) strand; PAM type: YTN; PAM sequence: TTG
aggcgacagtatagactctt

SEQ ID NO: 16545 - DNA, 20 bp, Artificial Sequence
  Description of Artificial Sequence: Synthetic oligonucleotide
  Target: ANGPTL4; (+) strand; PAM type: YTN; PAM sequence: CTC
ttttgtagattgctcacagc

SEQ ID NO: 16546 - DNA, 20 bp, Artificial Sequence
  Description of Artificial Sequence: Synthetic oligonucleotide
  Target: ANGPTL4; (+) strand; PAM type: YTN; PAM sequence: CTT
ttgtagattgctcacagcag

SEQ ID NO: 16547 - DNA, 20 bp, Artificial Sequence
  Description of Artificial Sequence: Synthetic oligonucleotide
  Target: ANGPTL4; (+) strand; PAM type: YTN; PAM sequence: TTT
tgtagattgctcacagcagg

SEQ ID NO: 16548 - DNA, 20 bp, Artificial Sequence
  Description of Artificial Sequence: Synthetic oligonucleotide
  Target: ANGPTL4; (+) strand; PAM type: YTN; PAM sequence: TTT
gtagattgctcacagcaggt

SEQ ID NO: 16549 - DNA, 20 bp, Artificial Sequence
  Description of Artificial Sequence: Synthetic oligonucleotide
  Target: ANGPTL4; (+) strand; PAM type: YTN; PAM sequence: TTG
tagattgctcacagcaggtg

SEQ ID NO: 16550 - DNA, 20 bp, Artificial Sequence
  Description of Artificial Sequence: Synthetic oligonucleotide
  Target: ANGPTL4; (+) strand; PAM type: YTN; PAM sequence: TTG
ctcacagcaggtgcccttaa

SEQ ID NO: 16551 - DNA, 20 bp, Artificial Sequence
  Description of Artificial Sequence: Synthetic oligonucleotide
  Target: ANGPTL4; (+) strand; PAM type: YTN; PAM sequence: CTC
acagcaggtgcccttaagac

SEQ ID NO: 16552 - DNA, 20 bp, Artificial Sequence
  Description of Artificial Sequence: Synthetic oligonucleotide
  Target: ANGPTL4; (+) strand; PAM type: YTN; PAM sequence: CTT
aagaccctgggtctgtgatg

SEQ ID NO: 16553 - DNA, 20 bp, Artificial Sequence
  Description of Artificial Sequence: Synthetic oligonucleotide
  Target: ANGPTL4; (+) strand; PAM type: YTN; PAM sequence: TTA
agaccctgggtctgtgatgt

SEQ ID NO: 16554 - DNA, 20 bp, Artificial Sequence
  Description of Artificial Sequence: Synthetic oligonucleotide
  Target: ANGPTL4; (+) strand; PAM type: YTN; PAM sequence: CTG
ggtctgtgatgtgttttgtg

SEQ ID NO: 16555 - DNA, 20 bp, Artificial Sequence
  Description of Artificial Sequence: Synthetic oligonucleotide
  Target: ANGPTL4; (+) strand; PAM type: YTN; PAM sequence: CTG
tgatgtgttttgtgctgtgg

SEQ ID NO: 16556 - DNA, 20 bp, Artificial Sequence
  Description of Artificial Sequence: Synthetic oligonucleotide
  Target: ANGPTL4; (+) strand; PAM type: YTN; PAM sequence: TTT
tgtgctgtgggacacatggc

SEQ ID NO: 16557 - DNA, 20 bp, Artificial Sequence
  Description of Artificial Sequence: Synthetic oligonucleotide
  Target: ANGPTL4; (+) strand; PAM type: YTN; PAM sequence: TTT
gtgctgtgggacacatggct

SEQ ID NO: 16558 - DNA, 20 bp, Artificial Sequence
  Description of Artificial Sequence: Synthetic oligonucleotide
  Target: ANGPTL4; (+) strand; PAM type: YTN; PAM sequence: TTG
tgctgtgggacacatggctc

SEQ ID NO: 16559 - DNA, 20 bp, Artificial Sequence
  Description of Artificial Sequence: Synthetic oligonucleotide
  Target: ANGPTL4; (+) strand; PAM type: YTN; PAM sequence: CTG
tgggacacatggctccaaag

SEQ ID NO: 16560 - DNA, 20 bp, Artificial Sequence
  Description of Artificial Sequence: Synthetic oligonucleotide
  Target: ANGPTL4; (+) strand; PAM type: YTN; PAM sequence: CTC
caaagaagtccctgaaaatc

SEQ ID NO: 16561 - DNA, 20 bp, Artificial Sequence
  Description of Artificial Sequence: Synthetic oligonucleotide
  Target: ANGPTL4; (+) strand; PAM type: YTN; PAM sequence: CTG
aaaatcagatcatgaaaagg

SEQ ID NO: 16562 - DNA, 20 bp, Artificial Sequence
  Description of Artificial Sequence: Synthetic oligonucleotide
  Target: ANGPTL4; (+) strand; PAM type: YTN; PAM sequence: TTG
gggaagtaattgatcagttc

SEQ ID NO: 16563 - DNA, 20 bp, Artificial Sequence
  Description of Artificial Sequence: Synthetic oligonucleotide
  Target: ANGPTL4; (+) strand; PAM type: YTN; PAM sequence: TTG
atcagttctctcagtttaag

SEQ ID NO: 16564 - DNA, 20 bp, Artificial Sequence
  Description of Artificial Sequence: Synthetic oligonucleotide
  Target: ANGPTL4; (+) strand; PAM type: YTN; PAM sequence: TTC
tctcagtttaagaaggtggg

SEQ ID NO: 16565 - DNA, 20 bp, Artificial Sequence
  Description of Artificial Sequence: Synthetic oligonucleotide
  Target: ANGPTL4; (+) strand; PAM type: YTN; PAM sequence: CTC
tcagtttaagaaggtgggga

SEQ ID NO: 16566 - DNA, 20 bp, Artificial Sequence
  Description of Artificial Sequence: Synthetic oligonucleotide
  Target: ANGPTL4; (+) strand; PAM type: YTN; PAM sequence: CTC
agtttaagaaggtggggaag

SEQ ID NO: 16567 - DNA, 20 bp, Artificial Sequence
  Description of Artificial Sequence: Synthetic oligonucleotide
  Target: ANGPTL4; (+) strand; PAM type: YTN; PAM sequence: TTT
aagaaggtggggaagaggag

SEQ ID NO: 16568 - DNA, 20 bp, Artificial Sequence
  Description of Artificial Sequence: Synthetic oligonucleotide
  Target: ANGPTL4; (+) strand; PAM type: YTN; PAM sequence: TTA
agaaggtggggaagaggagg

SEQ ID NO: 16569 - DNA, 20 bp, Artificial Sequence
  Description of Artificial Sequence: Synthetic oligonucleotide
  Target: ANGPTL4; (+) strand; PAM type: YTN; PAM sequence: CTT
gcattctgggatagcctggg

SEQ ID NO: 16570 - DNA, 20 bp, Artificial Sequence
  Description of Artificial Sequence: Synthetic oligonucleotide
  Target: ANGPTL4; (+) strand; PAM type: YTN; PAM sequence: TTG
cattctgggatagcctggga

SEQ ID NO: 16571 - DNA, 20 bp, Artificial Sequence
  Description of Artificial Sequence: Synthetic oligonucleotide
  Target: ANGPTL4; (+) strand; PAM type: YTN; PAM sequence: TTC
tgggatagcctgggatagct

SEQ ID NO: 16572 - DNA, 20 bp, Artificial Sequence
  Description of Artificial Sequence: Synthetic oligonucleotide
  Target: ANGPTL4; (+) strand; PAM type: YTN; PAM sequence: CTG
ggatagcctgggatagctgt

SEQ ID NO: 16573 - DNA, 20 bp, Artificial Sequence
  Description of Artificial Sequence: Synthetic oligonucleotide
  Target: ANGPTL4; (+) strand; PAM type: YTN; PAM sequence: CTG
ggatagctgtgtccctactc

SEQ ID NO: 16574 - DNA, 20 bp, Artificial Sequence
  Description of Artificial Sequence: Synthetic oligonucleotide
  Target: ANGPTL4; (+) strand; PAM type: YTN; PAM sequence: CTG
tgtccctactcagagagagg

SEQ ID NO: 16575 - DNA, 20 bp, Artificial Sequence
  Description of Artificial Sequence: Synthetic oligonucleotide
  Target: ANGPTL4; (+) strand; PAM type: YTN; PAM sequence: CTA
ctcagagagaggctgggggc

SEQ ID NO: 16576 - DNA, 20 bp, Artificial Sequence
  Description of Artificial Sequence: Synthetic oligonucleotide
  Target: ANGPTL4; (+) strand; PAM type: YTN; PAM sequence: CTC
agagagaggctgggggcttg

SEQ ID NO: 16577 - DNA, 20 bp, Artificial Sequence
  Description of Artificial Sequence: Synthetic oligonucleotide
  Target: ANGPTL4; (+) strand; PAM type: YTN; PAM sequence: CTG
ggggcttgggggtggacagg

SEQ ID NO: 16578 - DNA, 20 bp, Artificial Sequence
  Description of Artificial Sequence: Synthetic oligonucleotide
  Target: ANGPTL4; (+) strand; PAM type: YTN; PAM sequence: CTT
gggggtggacaggccagacg

SEQ ID NO: 16579 - DNA, 20 bp, Artificial Sequence
  Description of Artificial Sequence: Synthetic oligonucleotide
  Target: ANGPTL4; (+) strand; PAM type: YTN; PAM sequence: TTG
ggggtggacaggccagacgg

SEQ ID NO: 16580 - DNA, 20 bp, Artificial Sequence
  Description of Artificial Sequence: Synthetic oligonucleotide
  Target: ANGPTL4; (+) strand; PAM type: YTN; PAM sequence: CTG
aacctactcctcactggggt

SEQ ID NO: 16581 - DNA, 20 bp, Artificial Sequence
  Description of Artificial Sequence: Synthetic oligonucleotide
  Target: ANGPTL4; (+) strand; PAM type: YTN; PAM sequence: CTA
ctcctcactggggttttcct

SEQ ID NO: 16582 - DNA, 20 bp, Artificial Sequence
  Description of Artificial Sequence: Synthetic oligonucleotide
  Target: ANGPTL4; (+) strand; PAM type: YTN; PAM sequence: CTC
ctcactggggttttcctccc

SEQ ID NO: 16583 - DNA, 20 bp, Artificial Sequence
  Description of Artificial Sequence: Synthetic oligonucleotide
  Target: ANGPTL4; (+) strand; PAM type: YTN; PAM sequence: CTC
actggggttttcctccctcc

SEQ ID NO: 16584 - DNA, 20 bp, Artificial Sequence
  Description of Artificial Sequence: Synthetic oligonucleotide
  Target: ANGPTL4; (+) strand; PAM type: YTN; PAM sequence: CTG
gggttttcctccctcccttt

SEQ ID NO: 16585 - DNA, 20 bp, Artificial Sequence
  Description of Artificial Sequence: Synthetic oligonucleotide
  Target: ANGPTL4; (+) strand; PAM type: YTN; PAM sequence: TTT
tcctccctccctttcctgtc

SEQ ID NO: 16586 - DNA, 20 bp, Artificial Sequence
  Description of Artificial Sequence: Synthetic oligonucleotide
  Target: ANGPTL4; (+) strand; PAM type: YTN; PAM sequence: TTT
cctccctccctttcctgtcc

SEQ ID NO: 16587 - DNA, 20 bp, Artificial Sequence
  Description of Artificial Sequence: Synthetic oligonucleotide
  Target: ANGPTL4; (+) strand; PAM type: YTN; PAM sequence: TTC
ctccctccctttcctgtcca

SEQ ID NO: 16588 - DNA, 20 bp, Artificial Sequence
  Description of Artificial Sequence: Synthetic oligonucleotide
  Target: ANGPTL4; (+) strand; PAM type: YTN; PAM sequence: CTC
cctccctttcctgtccactg

SEQ ID NO: 16589 - DNA, 20 bp, Artificial Sequence
  Description of Artificial Sequence: Synthetic oligonucleotide
  Target: ANGPTL4; (+) strand; PAM type: YTN; PAM sequence: CTC
cctttcctgtccactgctgc

SEQ ID NO: 16590 - DNA, 20 bp, Artificial Sequence
  Description of Artificial Sequence: Synthetic oligonucleotide
  Target: ANGPTL4; (+) strand; PAM type: YTN; PAM sequence: CTT
tcctgtccactgctgctggg

SEQ ID NO: 16591 - DNA, 20 bp, Artificial Sequence
  Description of Artificial Sequence: Synthetic oligonucleotide
  Target: ANGPTL4; (+) strand; PAM type: YTN; PAM sequence: TTT
cctgtccactgctgctggga

SEQ ID NO: 16592 - DNA, 20 bp, Artificial Sequence
  Description of Artificial Sequence: Synthetic oligonucleotide
  Target: ANGPTL4; (+) strand; PAM type: YTN; PAM sequence: TTC
ctgtccactgctgctgggag

SEQ ID NO: 16593 - DNA, 20 bp, Artificial Sequence
  Description of Artificial Sequence: Synthetic oligonucleotide
  Target: ANGPTL4; (+) strand; PAM type: YTN; PAM sequence: CTG
tccactgctgctgggaggga

SEQ ID NO: 16594 - DNA, 20 bp, Artificial Sequence
  Description of Artificial Sequence: Synthetic oligonucleotide
  Target: ANGPTL4; (+) strand; PAM type: YTN; PAM sequence: CTG
ctgctgggagggatttgctg

SEQ ID NO: 16595 - DNA, 20 bp, Artificial Sequence
  Description of Artificial Sequence: Synthetic oligonucleotide
  Target: ANGPTL4; (+) strand; PAM type: YTN; PAM sequence: CTG
ctgggagggatttgctgtcc

SEQ ID NO: 16596 - DNA, 20 bp, Artificial Sequence
  Description of Artificial Sequence: Synthetic oligonucleotide
  Target: ANGPTL4; (+) strand; PAM type: YTN; PAM sequence: CTG
ggagggatttgctgtcctgg

SEQ ID NO: 16597 - DNA, 20 bp, Artificial Sequence
  Description of Artificial Sequence: Synthetic oligonucleotide
  Target: ANGPTL4; (+) strand; PAM type: YTN; PAM sequence: TTT
gctgtcctggcatctggccc

SEQ ID NO: 16598 - DNA, 20 bp, Artificial Sequence
  Description of Artificial Sequence: Synthetic oligonucleotide
  Target: ANGPTL4; (+) strand; PAM type: YTN; PAM sequence: TTG
ctgtcctggcatctggccca

SEQ ID NO: 16599 - DNA, 20 bp, Artificial Sequence
  Description of Artificial Sequence: Synthetic oligonucleotide
  Target: ANGPTL4; (+) strand; PAM type: YTN; PAM sequence: CTG
tcctggcatctggcccagct

SEQ ID NO: 16600 - DNA, 20 bp, Artificial Sequence
  Description of Artificial Sequence: Synthetic oligonucleotide
  Target: ANGPTL4; (+) strand; PAM type: YTN; PAM sequence: CTG
gcatctggcccagctgacgg

SEQ ID NO: 16601 - DNA, 20 bp, Artificial Sequence
  Description of Artificial Sequence: Synthetic oligonucleotide
  Target: ANGPTL4; (+) strand; PAM type: YTN; PAM sequence: CTG
gcccagctgacggggccaag

SEQ ID NO: 16602 - DNA, 20 bp, Artificial Sequence
  Description of Artificial Sequence: Synthetic oligonucleotide
  Target: ANGPTL4; (+) strand; PAM type: YTN; PAM sequence: CTG
acggggccaagtgtatgagt

SEQ ID NO: 16603 - DNA, 20 bp, Artificial Sequence
  Description of Artificial Sequence: Synthetic oligonucleotide
  Target: ANGPTL4; (+) strand; PAM type: YTN; PAM sequence: CTG
cacgtcagcccttgggtgtg

SEQ ID NO: 16604 - DNA, 20 bp, Artificial Sequence
  Description of Artificial Sequence: Synthetic oligonucleotide
  Target: ANGPTL4; (+) strand; PAM type: YTN; PAM sequence: CTT
gggtgtgcagtttcagattc

SEQ ID NO: 16605 - DNA, 20 bp, Artificial Sequence
  Description of Artificial Sequence: Synthetic oligonucleotide
  Target: ANGPTL4; (+) strand; PAM type: YTN; PAM sequence: TTG
ggtgtgcagtttcagattcc

SEQ ID NO: 16606 - DNA, 20 bp, Artificial Sequence
  Description of Artificial Sequence: Synthetic oligonucleotide
  Target: ANGPTL4; (+) strand; PAM type: YTN; PAM sequence: TTT
cagattccagagaatgagct

SEQ ID NO: 16607 - DNA, 20 bp, Artificial Sequence
  Description of Artificial Sequence: Synthetic oligonucleotide
  Target: ANGPTL4; (+) strand; PAM type: YTN; PAM sequence: TTC
agattccagagaatgagctg

SEQ ID NO: 16608 - DNA, 20 bp, Artificial Sequence
  Description of Artificial Sequence: Synthetic oligonucleotide
  Target: ANGPTL4; (+) strand; PAM type: YTN; PAM sequence: TTC
cagagaatgagctggcttgg

SEQ ID NO: 16609 - DNA, 20 bp, Artificial Sequence
  Description of Artificial Sequence: Synthetic oligonucleotide
  Target: ANGPTL4; (+) strand; PAM type: YTN; PAM sequence: CTG
gcttggagccctgctgagtc

SEQ ID NO: 16610 - DNA, 20 bp, Artificial Sequence
  Description of Artificial Sequence: Synthetic oligonucleotide
  Target: ANGPTL4; (+) strand; PAM type: YTN; PAM sequence: CTT
ggagccctgctgagtcaatg

SEQ ID NO: 16611 - DNA, 20 bp, Artificial Sequence
  Description of Artificial Sequence: Synthetic oligonucleotide
  Target: ANGPTL4; (+) strand; PAM type: YTN; PAM sequence: TTG
gagccctgctgagtcaatgc

SEQ ID NO: 16612 - DNA, 20 bp, Artificial Sequence
  Description of Artificial Sequence: Synthetic oligonucleotide
  Target: ANGPTL4; (+) strand; PAM type: YTN; PAM sequence: CTG
ctgagtcaatgcccttctcc

SEQ ID NO: 16613 - DNA, 20 bp, Artificial Sequence
  Description of Artificial Sequence: Synthetic oligonucleotide
  Target: ANGPTL4; (+) strand; PAM type: YTN; PAM sequence: CTG
agtcaatgcccttctccttg

SEQ ID NO: 16614 - DNA, 20 bp, Artificial Sequence
  Description of Artificial Sequence: Synthetic oligonucleotide
  Target: ANGPTL4; (+) strand; PAM type: YTN; PAM sequence: CTT
ctccttgccagtgctctgag

SEQ ID NO: 16615 - DNA, 20 bp, Artificial Sequence
  Description of Artificial Sequence: Synthetic oligonucleotide
  Target: ANGPTL4; (+) strand; PAM type: YTN; PAM sequence: TTC
tccttgccagtgctctgagc

SEQ ID NO: 16616 - DNA, 20 bp, Artificial Sequence
  Description of Artificial Sequence: Synthetic oligonucleotide
  Target: ANGPTL4; (+) strand; PAM type: YTN; PAM sequence: CTC
cttgccagtgctctgagcca

SEQ ID NO: 16617 - DNA, 20 bp, Artificial Sequence
  Description of Artificial Sequence: Synthetic oligonucleotide
  Target: ANGPTL4; (+) strand; PAM type: YTN; PAM sequence: CTT
gccagtgctctgagccaacc

SEQ ID NO: 16618 - DNA, 20 bp, Artificial Sequence
  Description of Artificial Sequence: Synthetic oligonucleotide
  Target: ANGPTL4; (+) strand; PAM type: YTN; PAM sequence: TTG
ccagtgctctgagccaacct

SEQ ID NO: 16619 - DNA, 20 bp, Artificial Sequence
  Description of Artificial Sequence: Synthetic oligonucleotide
  Target: ANGPTL4; (+) strand; PAM type: YTN; PAM sequence: CTC
tgagccaacctgccccgagt

SEQ ID NO: 16620 - DNA, 20 bp, Artificial Sequence
  Description of Artificial Sequence: Synthetic oligonucleotide
  Target: ANGPTL4; (+) strand; PAM type: YTN; PAM sequence: CTG
agccaacctgccccgagttc

SEQ ID NO: 16621 - DNA, 20 bp, Artificial Sequence
  Description of Artificial Sequence: Synthetic oligonucleotide
  Target: ANGPTL4; (+) strand; PAM type: YTN; PAM sequence: CTG
ccccgagttcttcctggcag

SEQ ID NO: 16622 - DNA, 20 bp, Artificial Sequence
  Description of Artificial Sequence: Synthetic oligonucleotide
  Target: ANGPTL4; (+) strand; PAM type: YTN; PAM sequence: TTC
ttcctggcaggctggttttc

SEQ ID NO: 16623 - DNA, 20 bp, Artificial Sequence
  Description of Artificial Sequence: Synthetic oligonucleotide
  Target: ANGPTL4; (+) strand; PAM type: YTN; PAM sequence: CTT
cctggcaggctggttttctg

SEQ ID NO: 16624 - DNA, 20 bp, Artificial Sequence
  Description of Artificial Sequence: Synthetic oligonucleotide
  Target: ANGPTL4; (+) strand; PAM type: YTN; PAM sequence: TTC
ctggcaggctggttttctgt

SEQ ID NO: 16625 - DNA, 20 bp, Artificial Sequence
  Description of Artificial Sequence: Synthetic oligonucleotide
  Target: ANGPTL4; (+) strand; PAM type: YTN; PAM sequence: CTG
gcaggctggttttctgtgcc

SEQ ID NO: 16626 - DNA, 20 bp, Artificial Sequence
  Description of Artificial Sequence: Synthetic oligonucleotide
  Target: ANGPTL4; (+) strand; PAM type: YTN; PAM sequence: CTG
gttttctgtgccagcctccc

SEQ ID NO: 16627 - DNA, 20 bp, Artificial Sequence
  Description of Artificial Sequence: Synthetic oligonucleotide
  Target: ANGPTL4; (+) strand; PAM type: YTN; PAM sequence: TTT
tctgtgccagcctccccttc

SEQ ID NO: 16628 - DNA, 20 bp, Artificial Sequence
  Description of Artificial Sequence: Synthetic oligonucleotide
  Target: ANGPTL4; (+) strand; PAM type: YTN; PAM sequence: TTT
ctgtgccagcctccccttcc

SEQ ID NO: 16629 - DNA, 20 bp, Artificial Sequence
  Description of Artificial Sequence: Synthetic oligonucleotide
  Target: ANGPTL4; (+) strand; PAM type: YTN; PAM sequence: TTC
tgtgccagcctccccttcct

SEQ ID NO: 16630 - DNA, 20 bp, Artificial Sequence
  Description of Artificial Sequence: Synthetic oligonucleotide
  Target: ANGPTL4; (+) strand; PAM type: YTN; PAM sequence: CTG
tgccagcctccccttcctga

SEQ ID NO: 16631 - DNA, 20 bp, Artificial Sequence
  Description of Artificial Sequence: Synthetic oligonucleotide
  Target: ANGPTL4; (+) strand; PAM type: YTN; PAM sequence: CTC
cccttcctgacagggtatag

SEQ ID NO: 16632 - DNA, 20 bp, Artificial Sequence
  Description of Artificial Sequence: Synthetic oligonucleotide
  Target: ANGPTL4; (+) strand; PAM type: YTN; PAM sequence: CTT
cctgacagggtataggggaa

SEQ ID NO: 16633 - DNA, 20 bp, Artificial Sequence
  Description of Artificial Sequence: Synthetic oligonucleotide
  Target: ANGPTL4; (+) strand; PAM type: YTN; PAM sequence: TTC
ctgacagggtataggggaat

SEQ ID NO: 16634 - DNA, 20 bp, Artificial Sequence
  Description of Artificial Sequence: Synthetic oligonucleotide
  Target: ANGPTL4; (+) strand; PAM type: YTN; PAM sequence: CTG
acagggtataggggaatggg

SEQ ID NO: 16635 - DNA, 20 bp, Artificial Sequence
  Description of Artificial Sequence: Synthetic oligonucleotide
  Target: ANGPTL4; (+) strand; PAM type: YTN; PAM sequence: TTT
gaatgaacacttagccctgt

SEQ ID NO: 16636 - DNA, 20 bp, Artificial Sequence
  Description of Artificial Sequence: Synthetic oligonucleotide
  Target: ANGPTL4; (+) strand; PAM type: YTN; PAM sequence: TTG
aatgaacacttagccctgtg

SEQ ID NO: 16637 - DNA, 20 bp, Artificial Sequence
  Description of Artificial Sequence: Synthetic oligonucleotide
  Target: ANGPTL4; (+) strand; PAM type: YTN; PAM sequence: CTT
agccctgtggaatgaatgtg

SEQ ID NO: 16638 - DNA, 20 bp, Artificial Sequence
  Description of Artificial Sequence: Synthetic oligonucleotide
  Target: ANGPTL4; (+) strand; PAM type: YTN; PAM sequence: TTA
gccctgtggaatgaatgtgg

SEQ ID NO: 16639 - DNA, 20 bp, Artificial Sequence
  Description of Artificial Sequence: Synthetic oligonucleotide
  Target: ANGPTL4; (+) strand; PAM type: YTN; PAM sequence: CTG
tggaatgaatgtggtccagc

SEQ ID NO: 16640 - DNA, 20 bp, Artificial Sequence
  Description of Artificial Sequence: Synthetic oligonucleotide
  Target: ANGPTL4; (+) strand; PAM type: YTN; PAM sequence: CTT
tagcctcactcagtacttcc

SEQ ID NO: 16641 - DNA, 20 bp, Artificial Sequence
  Description of Artificial Sequence: Synthetic oligonucleotide
  Target: ANGPTL4; (+) strand; PAM type: YTN; PAM sequence: TTT
agcctcactcagtacttcct

SEQ ID NO: 16642 - DNA, 20 bp, Artificial Sequence
  Description of Artificial Sequence: Synthetic oligonucleotide
  Target: ANGPTL4; (+) strand; PAM type: YTN; PAM sequence: TTA
gcctcactcagtacttcctt

SEQ ID NO: 16643 - DNA, 20 bp, Artificial Sequence
  Description of Artificial Sequence: Synthetic oligonucleotide
  Target: ANGPTL4; (+) strand; PAM type: YTN; PAM sequence: CTC
actcagtacttcctttgtcc

SEQ ID NO: 16644 - DNA, 20 bp, Artificial Sequence
  Description of Artificial Sequence: Synthetic oligonucleotide
  Target: ANGPTL4; (+) strand; PAM type: YTN; PAM sequence: CTC
agtacttcctttgtcccaac

SEQ ID NO: 16645 - DNA, 20 bp, Artificial Sequence
  Description of Artificial Sequence: Synthetic oligonucleotide
  Target: ANGPTL4; (+) strand; PAM type: YTN; PAM sequence: CTT
cctttgtcccaactctatcc

SEQ ID NO: 16646 - DNA, 20 bp, Artificial Sequence
  Description of Artificial Sequence: Synthetic oligonucleotide
  Target: ANGPTL4; (+) strand; PAM type: YTN; PAM sequence: TTC
ctttgtcccaactctatccc

SEQ ID NO: 16647 - DNA, 20 bp, Artificial Sequence
  Description of Artificial Sequence: Synthetic oligonucleotide
  Target: ANGPTL4; (+) strand; PAM type: YTN; PAM sequence: CTT
tgtcccaactctatccctac

SEQ ID NO: 16648 - DNA, 20 bp, Artificial Sequence
  Description of Artificial Sequence: Synthetic oligonucleotide
  Target: ANGPTL4; (+) strand; PAM type: YTN; PAM sequence: TTT
gtcccaactctatccctacc

SEQ ID NO: 16649 - DNA, 20 bp, Artificial Sequence
  Description of Artificial Sequence: Synthetic oligonucleotide
  Target: ANGPTL4; (+) strand; PAM type: YTN; PAM sequence: TTG
tcccaactctatccctaccc

SEQ ID NO: 16650 - DNA, 20 bp, Artificial Sequence
  Description of Artificial Sequence: Synthetic oligonucleotide
  Target: ANGPTL4; (+) strand; PAM type: YTN; PAM sequence: CTC
tatccctaccccaggctcag

SEQ ID NO: 16651 - DNA, 20 bp, Artificial Sequence
  Description of Artificial Sequence: Synthetic oligonucleotide
  Target: ANGPTL4; (+) strand; PAM type: YTN; PAM sequence: CTA
tccctaccccaggctcagaa

SEQ ID NO: 16652 - DNA, 20 bp, Artificial Sequence
  Description of Artificial Sequence: Synthetic oligonucleotide
  Target: ANGPTL4; (+) strand; PAM type: YTN; PAM sequence: CTA
ccccaggctcagaatgttgg

SEQ ID NO: 16653 - DNA, 20 bp, Artificial Sequence
  Description of Artificial Sequence: Synthetic oligonucleotide
  Target: ANGPTL4; (+) strand; PAM type: YTN; PAM sequence: CTC
agaatgttggggtatctcca

SEQ ID NO: 16654 - DNA, 20 bp, Artificial Sequence
  Description of Artificial Sequence: Synthetic oligonucleotide
  Target: ANGPTL4; (+) strand; PAM type: YTN; PAM sequence: TTG
gggtatctccacctgcctga

SEQ ID NO: 16655 - DNA, 20 bp, Artificial Sequence
  Description of Artificial Sequence: Synthetic oligonucleotide
  Target: ANGPTL4; (+) strand; PAM type: YTN; PAM sequence: CTC
cacctgcctgagaacttcaa

SEQ ID NO: 16656 - DNA, 20 bp, Artificial Sequence
  Description of Artificial Sequence: Synthetic oligonucleotide
  Target: ANGPTL4; (+) strand; PAM type: YTN; PAM sequence: CTG
cctgagaacttcaaacatac

SEQ ID NO: 16657 - DNA, 20 bp, Artificial Sequence
  Description of Artificial Sequence: Synthetic oligonucleotide
  Target: ANGPTL4; (+) strand; PAM type: YTN; PAM sequence: CTG
agaacttcaaacatacaggg

SEQ ID NO: 16658 - DNA, 20 bp, Artificial Sequence
  Description of Artificial Sequence: Synthetic oligonucleotide
  Target: ANGPTL4; (+) strand; PAM type: YTN; PAM sequence: CTT
caaacatacaggggctgggc

SEQ ID NO: 16659 - DNA, 20 bp, Artificial Sequence
  Description of Artificial Sequence: Synthetic oligonucleotide
  Target: ANGPTL4; (+) strand; PAM type: YTN; PAM sequence: TTC
aaacatacaggggctgggct

SEQ ID NO: 16660 - DNA, 20 bp, Artificial Sequence
  Description of Artificial Sequence: Synthetic oligonucleotide
  Target: ANGPTL4; (+) strand; PAM type: YTN; PAM sequence: CTG
ggcttagagggcagcagcac

SEQ ID NO: 16661 - DNA, 20 bp, Artificial Sequence
  Description of Artificial Sequence: Synthetic oligonucleotide
  Target: ANGPTL4; (+) strand; PAM type: YTN; PAM sequence: CTT
agagggcagcagcaccttcg

SEQ ID NO: 16662 - DNA, 20 bp, Artificial Sequence
  Description of Artificial Sequence: Synthetic oligonucleotide
  Target: ANGPTL4; (+) strand; PAM type: YTN; PAM sequence: TTA
gagggcagcagcaccttcgt

SEQ ID NO: 16663 - DNA, 20 bp, Artificial Sequence
  Description of Artificial Sequence: Synthetic oligonucleotide
  Target: ANGPTL4; (+) strand; PAM type: YTN; PAM sequence: CTT
cgttcagtgcatgagtgaat

SEQ ID NO: 16664 - DNA, 20 bp, Artificial Sequence
  Description of Artificial Sequence: Synthetic oligonucleotide
  Target: ANGPTL4; (+) strand; PAM type: YTN; PAM sequence: TTC
gttcagtgcatgagtgaatg

SEQ ID NO: 16665 - DNA, 20 bp, Artificial Sequence
  Description of Artificial Sequence: Synthetic oligonucleotide
  Target: ANGPTL4; (+) strand; PAM type: YTN; PAM sequence: TTC
agtgcatgagtgaatgaatg

SEQ ID NO: 16666 - DNA, 20 bp, Artificial Sequence
  Description of Artificial Sequence: Synthetic oligonucleotide
  Target: ANGPTL4; (+) strand; PAM type: YTN; PAM sequence: CTT
ccatgtctgaaacttttttt

SEQ ID NO: 16667 - DNA, 20 bp, Artificial Sequence
  Description of Artificial Sequence: Synthetic oligonucleotide
  Target: ANGPTL4; (+) strand; PAM type: YTN; PAM sequence: TTC
catgtctgaaactttttttt

SEQ ID NO: 16668 - DNA, 20 bp, Artificial Sequence
  Description of Artificial Sequence: Synthetic oligonucleotide
  Target: ANGPTL4; (+) strand; PAM type: YTN; PAM sequence: CTG
aaactttttttttttttttt

SEQ ID NO: 16669 - DNA, 20 bp, Artificial Sequence
  Description of Artificial Sequence: Synthetic oligonucleotide
  Target: ANGPTL4; (+) strand; PAM type: YTN; PAM sequence: CTT
ttttttttttttttgacaca

SEQ ID NO: 16670 - DNA, 20 bp, Artificial Sequence
  Description of Artificial Sequence: Synthetic oligonucleotide
  Target: ANGPTL4; (+) strand; PAM type: YTN; PAM sequence: TTT
tttttttttttttgacacac

SEQ ID NO: 16671 - DNA, 20 bp, Artificial Sequence
  Description of Artificial Sequence: Synthetic oligonucleotide
  Target: ANGPTL4; (+) strand; PAM type: YTN; PAM sequence: TTT
ttttttttttttgacacaca

SEQ ID NO: 16672 - DNA, 20 bp, Artificial Sequence
  Description of Artificial Sequence: Synthetic oligonucleotide
  Target: ANGPTL4; (+) strand; PAM type: YTN; PAM sequence: TTT
tttttttttttgacacacag

SEQ ID NO: 16673 - DNA, 20 bp, Artificial Sequence
  Description of Artificial Sequence: Synthetic oligonucleotide
  Target: ANGPTL4; (+) strand; PAM type: YTN; PAM sequence: TTT
ttttttttttgacacacagt

SEQ ID NO: 16674 - DNA, 20 bp, Artificial Sequence
  Description of Artificial Sequence: Synthetic oligonucleotide
  Target: ANGPTL4; (+) strand; PAM type: YTN; PAM sequence: TTT
tttttttttgacacacagtc

SEQ ID NO: 16675 - DNA, 20 bp, Artificial Sequence
  Description of Artificial Sequence: Synthetic oligonucleotide
  Target: ANGPTL4; (+) strand; PAM type: YTN; PAM sequence: TTT
ttttttttgacacacagtct

SEQ ID NO: 16676 - DNA, 20 bp, Artificial Sequence
  Description of Artificial Sequence: Synthetic oligonucleotide
  Target: ANGPTL4; (+) strand; PAM type: YTN; PAM sequence: TTT
tttttttgacacacagtctc

SEQ ID NO: 16677 - DNA, 20 bp, Artificial Sequence
  Description of Artificial Sequence: Synthetic oligonucleotide
  Target: ANGPTL4; (+) strand; PAM type: YTN; PAM sequence: TTT
ttttttgacacacagtctca

SEQ ID NO: 16678 - DNA, 20 bp, Artificial Sequence
  Description of Artificial Sequence: Synthetic oligonucleotide
  Target: ANGPTL4; (+) strand; PAM type: YTN; PAM sequence: TTT
tttttgacacacagtctcac

SEQ ID NO: 16679 - DNA, 20 bp, Artificial Sequence
  Description of Artificial Sequence: Synthetic oligonucleotide
  Target: ANGPTL4; (+) strand; PAM type: YTN; PAM sequence: TTT
ttttgacacacagtctcact

SEQ ID NO: 16680 - DNA, 20 bp, Artificial Sequence
  Description of Artificial Sequence: Synthetic oligonucleotide
  Target: ANGPTL4; (+) strand; PAM type: YTN; PAM sequence: TTT
tttgacacacagtctcactc

SEQ ID NO: 16681 - DNA, 20 bp, Artificial Sequence
  Description of Artificial Sequence: Synthetic oligonucleotide
  Target: ANGPTL4; (+) strand; PAM type: YTN; PAM sequence: TTT
ttgacacacagtctcactct

SEQ ID NO: 16682 - DNA, 20 bp, Artificial Sequence
  Description of Artificial Sequence: Synthetic oligonucleotide
  Target: ANGPTL4; (+) strand; PAM type: YTN; PAM sequence: TTT
tgacacacagtctcactctg

SEQ ID NO: 16683 - DNA, 20 bp, Artificial Sequence
  Description of Artificial Sequence: Synthetic oligonucleotide
  Target: ANGPTL4; (+) strand; PAM type: YTN; PAM sequence: TTT
gacacacagtctcactctgt

SEQ ID NO: 16684 - DNA, 20 bp, Artificial Sequence
  Description of Artificial Sequence: Synthetic oligonucleotide
  Target: ANGPTL4; (+) strand; PAM type: YTN; PAM sequence: TTG
acacacagtctcactctgtc

SEQ ID NO: 16685 - DNA, 20 bp, Artificial Sequence
  Description of Artificial Sequence: Synthetic oligonucleotide
  Target: ANGPTL4; (+) strand; PAM type: YTN; PAM sequence: CTC
actctgtcacccaggctgga

SEQ ID NO: 16686 - DNA, 20 bp, Artificial Sequence
  Description of Artificial Sequence: Synthetic oligonucleotide
  Target: ANGPTL4; (+) strand; PAM type: YTN; PAM sequence: CTC
tgtcacccaggctggagtgc

SEQ ID NO: 16687 - DNA, 20 bp, Artificial Sequence
  Description of Artificial Sequence: Synthetic oligonucleotide
  Target: ANGPTL4; (+) strand; PAM type: YTN; PAM sequence: CTG
tcacccaggctggagtgctg

SEQ ID NO: 16688 - DNA, 20 bp, Artificial Sequence
  Description of Artificial Sequence: Synthetic oligonucleotide
  Target: ANGPTL4; (+) strand; PAM type: YTN; PAM sequence: CTG
gagtgctgtggtgcaatctc

SEQ ID NO: 16689 - DNA, 20 bp, Artificial Sequence
  Description of Artificial Sequence: Synthetic oligonucleotide
  Target: ANGPTL4; (+) strand; PAM type: YTN; PAM sequence: CTG
tggtgcaatctcagctcact

SEQ ID NO: 16690 - DNA, 20 bp, Artificial Sequence
  Description of Artificial Sequence: Synthetic oligonucleotide
  Target: ANGPTL4; (+) strand; PAM type: YTN; PAM sequence: CTC
agctcactgcaacctccgtc

SEQ ID NO: 16691 - DNA, 20 bp, Artificial Sequence
  Description of Artificial Sequence: Synthetic oligonucleotide
  Target: ANGPTL4; (+) strand; PAM type: YTN; PAM sequence: CTC
actgcaacctccgtctcctg

SEQ ID NO: 16692 - DNA, 20 bp, Artificial Sequence
  Description of Artificial Sequence: Synthetic oligonucleotide
  Target: ANGPTL4; (+) strand; PAM type: YTN; PAM sequence: CTG
caacctccgtctcctgagtt

SEQ ID NO: 16693 - DNA, 20 bp, Artificial Sequence
  Description of Artificial Sequence: Synthetic oligonucleotide
  Target: ANGPTL4; (+) strand; PAM type: YTN; PAM sequence: CTC
cgtctcctgagttcaagcga

SEQ ID NO: 16694 - DNA, 20 bp, Artificial Sequence
  Description of Artificial Sequence: Synthetic oligonucleotide
  Target: ANGPTL4; (+) strand; PAM type: YTN; PAM sequence: CTC
ctgagttcaagcgattctcc

SEQ ID NO: 16695 - DNA, 20 bp, Artificial Sequence
  Description of Artificial Sequence: Synthetic oligonucleotide
  Target: ANGPTL4; (+) strand; PAM type: YTN; PAM sequence: CTG
agttcaagcgattctcctga

SEQ ID NO: 16696 - DNA, 20 bp, Artificial Sequence
  Description of Artificial Sequence: Synthetic oligonucleotide
  Target: ANGPTL4; (+) strand; PAM type: YTN; PAM sequence: TTC
aagcgattctcctgacacag

SEQ ID NO: 16697 - DNA, 20 bp, Artificial Sequence
  Description of Artificial Sequence: Synthetic oligonucleotide
  Target: ANGPTL4; (+) strand; PAM type: YTN; PAM sequence: TTC
tcctgacacagtctcccgag

SEQ ID NO: 16698 - DNA, 20 bp, Artificial Sequence
  Description of Artificial Sequence: Synthetic oligonucleotide
  Target: ANGPTL4; (+) strand; PAM type: YTN; PAM sequence: CTC
ctgacacagtctcccgagta

SEQ ID NO: 16699 - DNA, 20 bp, Artificial Sequence
  Description of Artificial Sequence: Synthetic oligonucleotide
  Target: ANGPTL4; (+) strand; PAM type: YTN; PAM sequence: CTG
acacagtctcccgagtagct

SEQ ID NO: 16700 - DNA, 20 bp, Artificial Sequence
  Description of Artificial Sequence: Synthetic oligonucleotide
  Target: ANGPTL4; (+) strand; PAM type: YTN; PAM sequence: CTC
ccgagtagctgtaagcacgt

SEQ ID NO: 16701 - DNA, 20 bp, Artificial Sequence
  Description of Artificial Sequence: Synthetic oligonucleotide
  Target: ANGPTL4; (+) strand; PAM type: YTN; PAM sequence: CTG
taagcacgtgccaccacacc

SEQ ID NO: 16702 - DNA, 20 bp, Artificial Sequence
  Description of Artificial Sequence: Synthetic oligonucleotide
  Target: ANGPTL4; (+) strand; PAM type: YTN; PAM sequence: CTA
attttttatttttagtagag

SEQ ID NO: 16703 - DNA, 20 bp, Artificial Sequence
  Description of Artificial Sequence: Synthetic oligonucleotide
  Target: ANGPTL4; (+) strand; PAM type: YTN; PAM sequence: TTT
tttatttttagtagagacga

SEQ ID NO: 16704 - DNA, 20 bp, Artificial Sequence
  Description of Artificial Sequence: Synthetic oligonucleotide
  Target: ANGPTL4; (+) strand; PAM type: YTN; PAM sequence: TTT
ttatttttagtagagacgag

SEQ ID NO: 16705 - DNA, 20 bp, Artificial Sequence
  Description of Artificial Sequence: Synthetic oligonucleotide
  Target: ANGPTL4; (+) strand; PAM type: YTN; PAM sequence: TTT
tatttttagtagagacgagg

SEQ ID NO: 16706 - DNA, 20 bp, Artificial Sequence
  Description of Artificial Sequence: Synthetic oligonucleotide
  Target: ANGPTL4; (+) strand; PAM type: YTN; PAM sequence: TTT
atttttagtagagacgaggt

SEQ ID NO: 16707 - DNA, 20 bp, Artificial Sequence
  Description of Artificial Sequence: Synthetic oligonucleotide
  Target: ANGPTL4; (+) strand; PAM type: YTN; PAM sequence: TTA
tttttagtagagacgaggtt

SEQ ID NO: 16708 - DNA, 20 bp, Artificial Sequence
  Description of Artificial Sequence: Synthetic oligonucleotide
  Target: ANGPTL4; (+) strand; PAM type: YTN; PAM sequence: TTT
ttagtagagacgaggtttca

SEQ ID NO: 16709 - DNA, 20 bp, Artificial Sequence
  Description of Artificial Sequence: Synthetic oligonucleotide
  Target: ANGPTL4; (+) strand; PAM type: YTN; PAM sequence: TTT
tagtagagacgaggtttcac

SEQ ID NO: 16710 - DNA, 20 bp, Artificial Sequence
  Description of Artificial Sequence: Synthetic oligonucleotide
  Target: ANGPTL4; (+) strand; PAM type: YTN; PAM sequence: TTT
agtagagacgaggtttcacc

SEQ ID NO: 16711 - DNA, 20 bp, Artificial Sequence
  Description of Artificial Sequence: Synthetic oligonucleotide
  Target: ANGPTL4; (+) strand; PAM type: YTN; PAM sequence: TTA
gtagagacgaggtttcacca

SEQ ID NO: 16712 - DNA, 20 bp, Artificial Sequence
  Description of Artificial Sequence: Synthetic oligonucleotide
  Target: ANGPTL4; (+) strand; PAM type: YTN; PAM sequence: TTT
caccatgttggccaggctga

SEQ ID NO: 16713 - DNA, 20 bp, Artificial Sequence
  Description of Artificial Sequence: Synthetic oligonucleotide
  Target: ANGPTL4; (+) strand; PAM type: YTN; PAM sequence: TTC
accatgttggccaggctgat

SEQ ID NO: 16714 - DNA, 20 bp, Artificial Sequence
  Description of Artificial Sequence: Synthetic oligonucleotide
  Target: ANGPTL4; (+) strand; PAM type: YTN; PAM sequence: TTG
gccaggctgatctcgaaccc

SEQ ID NO: 16715 - DNA, 20 bp, Artificial Sequence
  Description of Artificial Sequence: Synthetic oligonucleotide
  Target: ANGPTL4; (+) strand; PAM type: YTN; PAM sequence: CTG
atctcgaacccctgacctca

SEQ ID NO: 16716 - DNA, 20 bp, Artificial Sequence
  Description of Artificial Sequence: Synthetic oligonucleotide
  Target: ANGPTL4; (+) strand; PAM type: YTN; PAM sequence: CTC
gaacccctgacctcaggtga

SEQ ID NO: 16717 - DNA, 20 bp, Artificial Sequence
  Description of Artificial Sequence: Synthetic oligonucleotide
  Target: ANGPTL4; (+) strand; PAM type: YTN; PAM sequence: CTG
acctcaggtgatccgccccc

SEQ ID NO: 16718 - DNA, 20 bp, Artificial Sequence
  Description of Artificial Sequence: Synthetic oligonucleotide
  Target: ANGPTL4; (+) strand; PAM type: YTN; PAM sequence: CTC
aggtgatccgcccccccccc

SEQ ID NO: 16719 - DNA, 20 bp, Artificial Sequence
  Description of Artificial Sequence: Synthetic oligonucleotide
  Target: ANGPTL4; (+) strand; PAM type: YTN; PAM sequence: CTC
ccaccacccggcctcccaaa

SEQ ID NO: 16720 - DNA, 20 bp, Artificial Sequence
  Description of Artificial Sequence: Synthetic oligonucleotide
  Target: ANGPTL4; (+) strand; PAM type: YTN; PAM sequence: CTC
ccaaagtgctgggattacag

SEQ ID NO: 16721 - DNA, 20 bp, Artificial Sequence
  Description of Artificial Sequence: Synthetic oligonucleotide
  Target: ANGPTL4; (+) strand; PAM type: YTN; PAM sequence: CTG
ggattacaggcgtgagccac

SEQ ID NO: 16722 - DNA, 20 bp, Artificial Sequence
  Description of Artificial Sequence: Synthetic oligonucleotide
  Target: ANGPTL4; (+) strand; PAM type: YTN; PAM sequence: TTA
caggcgtgagccaccgcgcc

SEQ ID NO: 16723 - DNA, 20 bp, Artificial Sequence
  Description of Artificial Sequence: Synthetic oligonucleotide
  Target: ANGPTL4; (+) strand; PAM type: YTN; PAM sequence: CTG
gccacagacttttattttat

SEQ ID NO: 16724 - DNA, 20 bp, Artificial Sequence
  Description of Artificial Sequence: Synthetic oligonucleotide
  Target: ANGPTL4; (+) strand; PAM type: YTN; PAM sequence: CTT
ttattttatttcttttttag

SEQ ID NO: 16725 - DNA, 20 bp, Artificial Sequence
  Description of Artificial Sequence: Synthetic oligonucleotide
  Target: ANGPTL4; (+) strand; PAM type: YTN; PAM sequence: TTT
tattttatttcttttttaga

SEQ ID NO: 16726 - DNA, 20 bp, Artificial Sequence
  Description of Artificial Sequence: Synthetic oligonucleotide
  Target: ANGPTL4; (+) strand; PAM type: YTN; PAM sequence: TTT
attttatttcttttttagag

SEQ ID NO: 16727 - DNA, 20 bp, Artificial Sequence
  Description of Artificial Sequence: Synthetic oligonucleotide
  Target: ANGPTL4; (+) strand; PAM type: YTN; PAM sequence: TTA
ttttatttcttttttagaga

SEQ ID NO: 16728 - DNA, 20 bp, Artificial Sequence
  Description of Artificial Sequence: Synthetic oligonucleotide
  Target: ANGPTL4; (+) strand; PAM type: YTN; PAM sequence: TTT
tatttcttttttagagacag

SEQ ID NO: 16729 - DNA, 20 bp, Artificial Sequence
  Description of Artificial Sequence: Synthetic oligonucleotide
  Target: ANGPTL4; (+) strand; PAM type: YTN; PAM sequence: TTT
atttcttttttagagacagg

SEQ ID NO: 16730 - DNA, 20 bp, Artificial Sequence
  Description of Artificial Sequence: Synthetic oligonucleotide
  Target: ANGPTL4; (+) strand; PAM type: YTN; PAM sequence: TTA
tttcttttttagagacagga

SEQ ID NO: 16731 - DNA, 20 bp, Artificial Sequence
  Description of Artificial Sequence: Synthetic oligonucleotide
  Target: ANGPTL4; (+) strand; PAM type: YTN; PAM sequence: TTT
cttttttagagacaggatct

SEQ ID NO: 16732 - DNA, 20 bp, Artificial Sequence
  Description of Artificial Sequence: Synthetic oligonucleotide
  Target: ANGPTL4; (+) strand; PAM type: YTN; PAM sequence: TTC
ttttttagagacaggatctc

SEQ ID NO: 16733 - DNA, 20 bp, Artificial Sequence
  Description of Artificial Sequence: Synthetic oligonucleotide
  Target: ANGPTL4; (+) strand; PAM type: YTN; PAM sequence: CTT
ttttagagacaggatctcac

SEQ ID NO: 16734 - DNA, 20 bp, Artificial Sequence
  Description of Artificial Sequence: Synthetic oligonucleotide
  Target: ANGPTL4; (+) strand; PAM type: YTN; PAM sequence: TTT
tttagagacaggatctcact

SEQ ID NO: 16735 - DNA, 20 bp, Artificial Sequence
  Description of Artificial Sequence: Synthetic oligonucleotide
  Target: ANGPTL4; (+) strand; PAM type: YTN; PAM sequence: TTT
ttagagacaggatctcactc

SEQ ID NO: 16736 - DNA, 20 bp, Artificial Sequence
  Description of Artificial Sequence: Synthetic oligonucleotide
  Target: ANGPTL4; (+) strand; PAM type: YTN; PAM sequence: TTT
tagagacaggatctcactct

SEQ ID NO: 16737 - DNA, 20 bp, Artificial Sequence
  Description of Artificial Sequence: Synthetic oligonucleotide
  Target: ANGPTL4; (+) strand; PAM type: YTN; PAM sequence: TTT
agagacaggatctcactctg

SEQ ID NO: 16738 - DNA, 20 bp, Artificial Sequence
  Description of Artificial Sequence: Synthetic oligonucleotide
  Target: ANGPTL4; (+) strand; PAM type: YTN; PAM sequence: TTA
gagacaggatctcactctgt

SEQ ID NO: 16739 - DNA, 20 bp, Artificial Sequence
  Description of Artificial Sequence: Synthetic oligonucleotide
  Target: ANGPTL4; (+) strand; PAM type: YTN; PAM sequence: CTC
actctgttgcccaggctgga

SEQ ID NO: 16740 - DNA, 20 bp, Artificial Sequence
  Description of Artificial Sequence: Synthetic oligonucleotide
  Target: ANGPTL4; (+) strand; PAM type: YTN; PAM sequence: CTC
tgttgcccaggctggagtgc

SEQ ID NO: 16741 - DNA, 20 bp, Artificial Sequence
  Description of Artificial Sequence: Synthetic oligonucleotide
  Target: ANGPTL4; (+) strand; PAM type: YTN; PAM sequence: CTG
ttgcccaggctggagtgcag

SEQ ID NO: 16742 - DNA, 20 bp, Artificial Sequence
  Description of Artificial Sequence: Synthetic oligonucleotide
  Target: ANGPTL4; (+) strand; PAM type: YTN; PAM sequence: TTG
cccaggctggagtgcagtgg

SEQ ID NO: 16743 - DNA, 20 bp, Artificial Sequence
  Description of Artificial Sequence: Synthetic oligonucleotide
  Target: ANGPTL4; (+) strand; PAM type: YTN; PAM sequence: CTG
gagtgcagtggcaccattgt

SEQ ID NO: 16744 - DNA, 20 bp, Artificial Sequence
  Description of Artificial Sequence: Synthetic oligonucleotide
  Target: ANGPTL4; (+) strand; PAM type: YTN; PAM sequence: TTG
tggctcactgcagcctctac

SEQ ID NO: 16745 - DNA, 20 bp, Artificial Sequence
  Description of Artificial Sequence: Synthetic oligonucleotide
  Target: ANGPTL4; (+) strand; PAM type: YTN; PAM sequence: CTC
actgcagcctctacctcctg

SEQ ID NO: 16746 - DNA, 20 bp, Artificial Sequence
  Description of Artificial Sequence: Synthetic oligonucleotide
  Target: ANGPTL4; (+) strand; PAM type: YTN; PAM sequence: CTG
cagcctctacctcctgggct

SEQ ID NO: 16747 - DNA, 20 bp, Artificial Sequence
  Description of Artificial Sequence: Synthetic oligonucleotide
  Target: ANGPTL4; (+) strand; PAM type: YTN; PAM sequence: CTC
tacctcctgggctcaagtga

SEQ ID NO: 16748 - DNA, 20 bp, Artificial Sequence
  Description of Artificial Sequence: Synthetic oligonucleotide
  Target: ANGPTL4; (+) strand; PAM type: YTN; PAM sequence: CTA
cctcctgggctcaagtgagc

SEQ ID NO: 16749 - DNA, 20 bp, Artificial Sequence
  Description of Artificial Sequence: Synthetic oligonucleotide
  Target: ANGPTL4; (+) strand; PAM type: YTN; PAM sequence: CTC
ctgggctcaagtgagcctcc

SEQ ID NO: 16750 - DNA, 20 bp, Artificial Sequence
  Description of Artificial Sequence: Synthetic oligonucleotide
  Target: ANGPTL4; (+) strand; PAM type: YTN; PAM sequence: CTG
ggctcaagtgagcctcccac

SEQ ID NO: 16751 - DNA, 20 bp, Artificial Sequence
  Description of Artificial Sequence: Synthetic oligonucleotide
  Target: ANGPTL4; (+) strand; PAM type: YTN; PAM sequence: CTC
aagtgagcctcccacctcag

SEQ ID NO: 16752 - DNA, 20 bp, Artificial Sequence
  Description of Artificial Sequence: Synthetic oligonucleotide
  Target: ANGPTL4; (+) strand; PAM type: YTN; PAM sequence: CTC
ccacctcaggctcccaagta

SEQ ID NO: 16753 - DNA, 20 bp, Artificial Sequence
  Description of Artificial Sequence: Synthetic oligonucleotide
  Target: ANGPTL4; (+) strand; PAM type: YTN; PAM sequence: CTC
aggctcccaagtagctgcga

SEQ ID NO: 16754 - DNA, 20 bp, Artificial Sequence
  Description of Artificial Sequence: Synthetic oligonucleotide
  Target: ANGPTL4; (+) strand; PAM type: YTN; PAM sequence: CTC
ccaagtagctgcgaccacag

SEQ ID NO: 16755 - DNA, 20 bp, Artificial Sequence
  Description of Artificial Sequence: Synthetic oligonucleotide
  Target: ANGPTL4; (+) strand; PAM type: YTN; PAM sequence: CTG
cgaccacagtcatgggcgac

SEQ ID NO: 16756 - DNA, 20 bp, Artificial Sequence
  Description of Artificial Sequence: Synthetic oligonucleotide
  Target: ANGPTL4; (+) strand; PAM type: YTN; PAM sequence: CTG
gttcctcccttccttgtgtc

SEQ ID NO: 16757 - DNA, 20 bp, Artificial Sequence
  Description of Artificial Sequence: Synthetic oligonucleotide
  Target: ANGPTL4; (+) strand; PAM type: YTN; PAM sequence: TTC
ctcccttccttgtgtctcct

SEQ ID NO: 16758 - DNA, 20 bp, Artificial Sequence
  Description of Artificial Sequence: Synthetic oligonucleotide
  Target: ANGPTL4; (+) strand; PAM type: YTN; PAM sequence: CTC
ccttccttgtgtctcctctt

SEQ ID NO: 16759 - DNA, 20 bp, Artificial Sequence
  Description of Artificial Sequence: Synthetic oligonucleotide
  Target: ANGPTL4; (+) strand; PAM type: YTN; PAM sequence: CTT
ccttgtgtctcctctttctg

SEQ ID NO: 16760 - DNA, 20 bp, Artificial Sequence
  Description of Artificial Sequence: Synthetic oligonucleotide
  Target: ANGPTL4; (+) strand; PAM type: YTN; PAM sequence: TTC
cttgtgtctcctctttctgt

SEQ ID NO: 16761 - DNA, 20 bp, Artificial Sequence
  Description of Artificial Sequence: Synthetic oligonucleotide
  Target: ANGPTL4; (+) strand; PAM type: YTN; PAM sequence: CTT
gtgtctcctctttctgttct

SEQ ID NO: 16762 - DNA, 20 bp, Artificial Sequence
  Description of Artificial Sequence: Synthetic oligonucleotide
  Target: ANGPTL4; (+) strand; PAM type: YTN; PAM sequence: TTG
tgtctcctctttctgttctc

SEQ ID NO: 16763 - DNA, 20 bp, Artificial Sequence
  Description of Artificial Sequence: Synthetic oligonucleotide
  Target: ANGPTL4; (+) strand; PAM type: YTN; PAM sequence: CTC
ctctttctgttctctaagtt

SEQ ID NO: 16764 - DNA, 20 bp, Artificial Sequence
  Description of Artificial Sequence: Synthetic oligonucleotide
  Target: ANGPTL4; (+) strand; PAM type: YTN; PAM sequence: CTC
tttctgttctctaagttcct

SEQ ID NO: 16765 - DNA, 20 bp, Artificial Sequence
  Description of Artificial Sequence: Synthetic oligonucleotide
  Target: ANGPTL4; (+) strand; PAM type: YTN; PAM sequence: CTT
tctgttctctaagttcctgc

SEQ ID NO: 16766 - DNA, 20 bp, Artificial Sequence
  Description of Artificial Sequence: Synthetic oligonucleotide
  Target: ANGPTL4; (+) strand; PAM type: YTN; PAM sequence: TTT
ctgttctctaagttcctgct

SEQ ID NO: 16767 - DNA, 20 bp, Artificial Sequence
  Description of Artificial Sequence: Synthetic oligonucleotide
  Target: ANGPTL4; (+) strand; PAM type: YTN; PAM sequence: TTC
tgttctctaagttcctgctt

SEQ ID NO: 16768 - DNA, 20 bp, Artificial Sequence
  Description of Artificial Sequence: Synthetic oligonucleotide
  Target: ANGPTL4; (+) strand; PAM type: YTN; PAM sequence: CTG
ttctctaagttcctgcttta

SEQ ID NO: 16769 - DNA, 20 bp, Artificial Sequence
  Description of Artificial Sequence: Synthetic oligonucleotide
  Target: ANGPTL4; (+) strand; PAM type: YTN; PAM sequence: TTC
tctaagttcctgctttatta

SEQ ID NO: 16770 - DNA, 20 bp, Artificial Sequence
  Description of Artificial Sequence: Synthetic oligonucleotide
  Target: ANGPTL4; (+) strand; PAM type: YTN; PAM sequence: CTC
taagttcctgctttattata

SEQ ID NO: 16771 - DNA, 20 bp, Artificial Sequence
  Description of Artificial Sequence: Synthetic oligonucleotide
  Target: ANGPTL4; (+) strand; PAM type: YTN; PAM sequence: CTA
agttcctgctttattatagg

SEQ ID NO: 16772 - DNA, 20 bp, Artificial Sequence
  Description of Artificial Sequence: Synthetic oligonucleotide
  Target: ANGPTL4; (+) strand; PAM type: YTN; PAM sequence: TTC
ctgctttattataggcaaag

SEQ ID NO: 16773 - DNA, 20 bp, Artificial Sequence
  Description of Artificial Sequence: Synthetic oligonucleotide
  Target: ANGPTL4; (+) strand; PAM type: YTN; PAM sequence: CTG
ctttattataggcaaagctc

SEQ ID NO: 16774 - DNA, 20 bp, Artificial Sequence
  Description of Artificial Sequence: Synthetic oligonucleotide
  Target: ANGPTL4; (+) strand; PAM type: YTN; PAM sequence: CTT
tattataggcaaagctcagg

SEQ ID NO: 16775 - DNA, 20 bp, Artificial Sequence
  Description of Artificial Sequence: Synthetic oligonucleotide
  Target: ANGPTL4; (+) strand; PAM type: YTN; PAM sequence: TTT
attataggcaaagctcagga

SEQ ID NO: 16776 - DNA, 20 bp, Artificial Sequence
  Description of Artificial Sequence: Synthetic oligonucleotide
  Target: ANGPTL4; (+) strand; PAM type: YTN; PAM sequence: TTA
ttataggcaaagctcaggac

SEQ ID NO: 16777 - DNA, 20 bp, Artificial Sequence
  Description of Artificial Sequence: Synthetic oligonucleotide
  Target: ANGPTL4; (+) strand; PAM type: YTN; PAM sequence: TTA
taggcaaagctcaggacatt

SEQ ID NO: 16778 - DNA, 20 bp, Artificial Sequence
  Description of Artificial Sequence: Synthetic oligonucleotide
  Target: ANGPTL4; (+) strand; PAM type: YTN; PAM sequence: CTC
aggacattaaagaccctggc

SEQ ID NO: 16779 - DNA, 20 bp, Artificial Sequence
  Description of Artificial Sequence: Synthetic oligonucleotide
  Target: ANGPTL4; (+) strand; PAM type: YTN; PAM sequence: TTA
aagaccctggcggtagaggg

SEQ ID NO: 16780 - DNA, 20 bp, Artificial Sequence
  Description of Artificial Sequence: Synthetic oligonucleotide
  Target: ANGPTL4; (+) strand; PAM type: YTN; PAM sequence: CTG
gcggtagagggtaggctatg

SEQ ID NO: 16781 - DNA, 20 bp, Artificial Sequence
  Description of Artificial Sequence: Synthetic oligonucleotide
  Target: ANGPTL4; (+) strand; PAM type: YTN; PAM sequence: CTA
tgggggtgaggccctgatcc

SEQ ID NO: 16782 - DNA, 20 bp, Artificial Sequence
  Description of Artificial Sequence: Synthetic oligonucleotide
  Target: ANGPTL4; (+) strand; PAM type: YTN; PAM sequence: CTG
atccaagtcctgccgctaag

SEQ ID NO: 16783 - DNA, 20 bp, Artificial Sequence
  Description of Artificial Sequence: Synthetic oligonucleotide
  Target: ANGPTL4; (+) strand; PAM type: YTN; PAM sequence: CTG
ccgctaaggcactcataatt

SEQ ID NO: 16784 - DNA, 20 bp, Artificial Sequence
  Description of Artificial Sequence: Synthetic oligonucleotide
  Target: ANGPTL4; (+) strand; PAM type: YTN; PAM sequence: CTA
aggcactcataatttcgggc

SEQ ID NO: 16785 - DNA, 20 bp, Artificial Sequence
  Description of Artificial Sequence: Synthetic oligonucleotide
  Target: ANGPTL4; (+) strand; PAM type: YTN; PAM sequence: CTC
ataatttcgggctcagggga

SEQ ID NO: 16786 - DNA, 20 bp, Artificial Sequence
  Description of Artificial Sequence: Synthetic oligonucleotide
  Target: ANGPTL4; (+) strand; PAM type: YTN; PAM sequence: TTT
cgggctcaggggagaaatgg

SEQ ID NO: 16787 - DNA, 20 bp, Artificial Sequence
  Description of Artificial Sequence: Synthetic oligonucleotide
  Target: ANGPTL4; (+) strand; PAM type: YTN; PAM sequence: TTC
gggctcaggggagaaatgga

SEQ ID NO: 16788 - DNA, 20 bp, Artificial Sequence
  Description of Artificial Sequence: Synthetic oligonucleotide
  Target: ANGPTL4; (+) strand; PAM type: YTN; PAM sequence: CTC
aggggagaaatggaagtcaa

SEQ ID NO: 16789 - DNA, 20 bp, Artificial Sequence
  Description of Artificial Sequence: Synthetic oligonucleotide
  Target: ANGPTL4; (+) strand; PAM type: YTN; PAM sequence: CTC
ataaacacagctgcgatgac

SEQ ID NO: 16790 - DNA, 20 bp, Artificial Sequence
  Description of Artificial Sequence: Synthetic oligonucleotide
  Target: ANGPTL4; (+) strand; PAM type: YTN; PAM sequence: CTG
cgatgacgaaccctttcacg

SEQ ID NO: 16791 - DNA, 20 bp, Artificial Sequence
  Description of Artificial Sequence: Synthetic oligonucleotide
  Target: ANGPTL4; (+) strand; PAM type: YTN; PAM sequence: CTT
tcacgggaaggaacatgcga

SEQ ID NO: 16792 - DNA, 20 bp, Artificial Sequence
  Description of Artificial Sequence: Synthetic oligonucleotide
  Target: ANGPTL4; (+) strand; PAM type: YTN; PAM sequence: TTT
cacgggaaggaacatgcgag

SEQ ID NO: 16793 - DNA, 20 bp, Artificial Sequence
  Description of Artificial Sequence: Synthetic oligonucleotide
  Target: ANGPTL4; (+) strand; PAM type: YTN; PAM sequence: TTC
acgggaaggaacatgcgagc

SEQ ID NO: 16794 - DNA, 20 bp, Artificial Sequence
  Description of Artificial Sequence: Synthetic oligonucleotide
  Target: ANGPTL4; (+) strand; PAM type: YTN; PAM sequence: CTC
tcctggtcttgggatggagg

SEQ ID NO: 16795 - DNA, 20 bp, Artificial Sequence
  Description of Artificial Sequence: Synthetic oligonucleotide
  Target: ANGPTL4; (+) strand; PAM type: YTN; PAM sequence: CTC
ctggtcttgggatggaggtc

SEQ ID NO: 16796 - DNA, 20 bp, Artificial Sequence
  Description of Artificial Sequence: Synthetic oligonucleotide
  Target: ANGPTL4; (+) strand; PAM type: YTN; PAM sequence: CTG
gtcttgggatggaggtcaca

SEQ ID NO: 16797 - DNA, 20 bp, Artificial Sequence
  Description of Artificial Sequence: Synthetic oligonucleotide
  Target: ANGPTL4; (+) strand; PAM type: YTN; PAM sequence: CTT
gggatggaggtcacacgaag

SEQ ID NO: 16798 - DNA, 20 bp, Artificial Sequence
  Description of Artificial Sequence: Synthetic oligonucleotide
  Target: ANGPTL4; (+) strand; PAM type: YTN; PAM sequence: TTG
ggatggaggtcacacgaagc

SEQ ID NO: 16799 - DNA, 20 bp, Artificial Sequence
  Description of Artificial Sequence: Synthetic oligonucleotide
  Target: ANGPTL4; (+) strand; PAM type: YTN; PAM sequence: CTC
cgcaaggcaaggacttttgg

SEQ ID NO: 16800 - DNA, 20 bp, Artificial Sequence
  Description of Artificial Sequence: Synthetic oligonucleotide
  Target: ANGPTL4; (+) strand; PAM type: YTN; PAM sequence: CTT
ttggtgagttccgggctccg

SEQ ID NO: 16801 - DNA, 20 bp, Artificial Sequence
  Description of Artificial Sequence: Synthetic oligonucleotide
  Target: ANGPTL4; (+) strand; PAM type: YTN; PAM sequence: TTT
tggtgagttccgggctccgc

SEQ ID NO: 16802 - DNA, 20 bp, Artificial Sequence
  Description of Artificial Sequence: Synthetic oligonucleotide
  Target: ANGPTL4; (+) strand; PAM type: YTN; PAM sequence: TTT
ggtgagttccgggctccgct

SEQ ID NO: 16803 - DNA, 20 bp, Artificial Sequence
  Description of Artificial Sequence: Synthetic oligonucleotide
  Target: ANGPTL4; (+) strand; PAM type: YTN; PAM sequence: TTG
gtgagttccgggctccgctg

SEQ ID NO: 16804 - DNA, 20 bp, Artificial Sequence
  Description of Artificial Sequence: Synthetic oligonucleotide
  Target: ANGPTL4; (+) strand; PAM type: YTN; PAM sequence: TTC
cgggctccgctgaactcagc

SEQ ID NO: 16805 - DNA, 20 bp, Artificial Sequence
  Description of Artificial Sequence: Synthetic oligonucleotide
  Target: ANGPTL4; (+) strand; PAM type: YTN; PAM sequence: CTC
cgctgaactcagctcttttt

SEQ ID NO: 16806 - DNA, 20 bp, Artificial Sequence
  Description of Artificial Sequence: Synthetic oligonucleotide
  Target: ANGPTL4; (+) strand; PAM type: YTN; PAM sequence: CTG
aactcagctctttttctttt

SEQ ID NO: 16807 - DNA, 20 bp, Artificial Sequence
  Description of Artificial Sequence: Synthetic oligonucleotide
  Target: ANGPTL4; (+) strand; PAM type: YTN; PAM sequence: CTC
agctctttttcttttccttc

SEQ ID NO: 16808 - DNA, 20 bp, Artificial Sequence
  Description of Artificial Sequence: Synthetic oligonucleotide
  Target: ANGPTL4; (+) strand; PAM type: YTN; PAM sequence: CTC
tttttcttttccttcctttc

SEQ ID NO: 16809 - DNA, 20 bp, Artificial Sequence
  Description of Artificial Sequence: Synthetic oligonucleotide
  Target: ANGPTL4; (+) strand; PAM type: YTN; PAM sequence: CTT
tttcttttccttcctttctt

SEQ ID NO: 16810 - DNA, 20 bp, Artificial Sequence
  Description of Artificial Sequence: Synthetic oligonucleotide
  Target: ANGPTL4; (+) strand; PAM type: YTN; PAM sequence: TTT
ttcttttccttcctttcttt

SEQ ID NO: 16811 - DNA, 20 bp, Artificial Sequence
  Description of Artificial Sequence: Synthetic oligonucleotide
  Target: ANGPTL4; (+) strand; PAM type: YTN; PAM sequence: TTT
tcttttccttcctttctttc

SEQ ID NO: 16812 - DNA, 20 bp, Artificial Sequence
  Description of Artificial Sequence: Synthetic oligonucleotide
  Target: ANGPTL4; (+) strand; PAM type: YTN; PAM sequence: TTT
cttttccttcctttctttcc

SEQ ID NO: 16813 - DNA, 20 bp, Artificial Sequence
  Description of Artificial Sequence: Synthetic oligonucleotide
  Target: ANGPTL4; (+) strand; PAM type: YTN; PAM sequence: TTC
ttttccttcctttctttcct

SEQ ID NO: 16814 - DNA, 20 bp, Artificial Sequence
  Description of Artificial Sequence: Synthetic oligonucleotide
  Target: ANGPTL4; (+) strand; PAM type: YTN; PAM sequence: CTT
ttccttcctttctttccttc

SEQ ID NO: 16815 - DNA, 20 bp, Artificial Sequence
  Description of Artificial Sequence: Synthetic oligonucleotide
  Target: ANGPTL4; (+) strand; PAM type: YTN; PAM sequence: TTT
tccttcctttctttccttct

SEQ ID NO: 16816 - DNA, 20 bp, Artificial Sequence
  Description of Artificial Sequence: Synthetic oligonucleotide
  Target: ANGPTL4; (+) strand; PAM type: YTN; PAM sequence: TTT
ccttcctttctttccttctt

SEQ ID NO: 16817 - DNA, 20 bp, Artificial Sequence
  Description of Artificial Sequence: Synthetic oligonucleotide
  Target: ANGPTL4; (+) strand; PAM type: YTN; PAM sequence: TTC
cttcctttctttccttcttc

SEQ ID NO: 16818 - DNA, 20 bp, Artificial Sequence
  Description of Artificial Sequence: Synthetic oligonucleotide
  Target: ANGPTL4; (+) strand; PAM type: YTN; PAM sequence: CTT
cctttctttccttcttcctt

SEQ ID NO: 16819 - DNA, 20 bp, Artificial Sequence
  Description of Artificial Sequence: Synthetic oligonucleotide
  Target: ANGPTL4; (+) strand; PAM type: YTN; PAM sequence: TTC
ctttctttccttcttccttt

SEQ ID NO: 16820 - DNA, 20 bp, Artificial Sequence
  Description of Artificial Sequence: Synthetic oligonucleotide
  Target: ANGPTL4; (+) strand; PAM type: YTN; PAM sequence: CTT
tctttccttcttcctttctt

SEQ ID NO: 16821 - DNA, 20 bp, Artificial Sequence
  Description of Artificial Sequence: Synthetic oligonucleotide
  Target: ANGPTL4; (+) strand; PAM type: YTN; PAM sequence: TTT
ctttccttcttcctttcttt

SEQ ID NO: 16822 - DNA, 20 bp, Artificial Sequence
  Description of Artificial Sequence: Synthetic oligonucleotide
  Target: ANGPTL4; (+) strand; PAM type: YTN; PAM sequence: TTC
tttccttcttcctttctttc

SEQ ID NO: 16823 - DNA, 20 bp, Artificial Sequence
  Description of Artificial Sequence: Synthetic oligonucleotide
  Target: ANGPTL4; (+) strand; PAM type: YTN; PAM sequence: CTT
tccttcttcctttctttccc

SEQ ID NO: 16824 - DNA, 20 bp, Artificial Sequence
  Description of Artificial Sequence: Synthetic oligonucleotide
  Target: ANGPTL4; (+) strand; PAM type: YTN; PAM sequence: TTT
ccttcttcctttctttccct

SEQ ID NO: 16825 - DNA, 20 bp, Artificial Sequence
  Description of Artificial Sequence: Synthetic oligonucleotide
  Target: ANGPTL4; (+) strand; PAM type: YTN; PAM sequence: TTC
cttcttcctttctttccctc

SEQ ID NO: 16826 - DNA, 20 bp, Artificial Sequence
  Description of Artificial Sequence: Synthetic oligonucleotide
  Target: ANGPTL4; (+) strand; PAM type: YTN; PAM sequence: CTT
cttcctttctttccctcctt

SEQ ID NO: 16827 - DNA, 20 bp, Artificial Sequence
  Description of Artificial Sequence: Synthetic oligonucleotide
  Target: ANGPTL4; (+) strand; PAM type: YTN; PAM sequence: TTC
ttcctttctttccctccttc

SEQ ID NO: 16828 - DNA, 20 bp, Artificial Sequence
  Description of Artificial Sequence: Synthetic oligonucleotide
  Target: ANGPTL4; (+) strand; PAM type: YTN; PAM sequence: CTT
cctttctttccctccttcct

SEQ ID NO: 16829 - DNA, 20 bp, Artificial Sequence
  Description of Artificial Sequence: Synthetic oligonucleotide
  Target: ANGPTL4; (+) strand; PAM type: YTN; PAM sequence: TTC
ctttctttccctccttcctt

SEQ ID NO: 16830 - DNA, 20 bp, Artificial Sequence
  Description of Artificial Sequence: Synthetic oligonucleotide
  Target: ANGPTL4; (+) strand; PAM type: YTN; PAM sequence: CTT
tctttccctccttccttcct

SEQ ID NO: 16831 - DNA, 20 bp, Artificial Sequence
  Description of Artificial Sequence: Synthetic oligonucleotide
  Target: ANGPTL4; (+) strand; PAM type: YTN; PAM sequence: TTT
ctttccctccttccttcctt

SEQ ID NO: 16832 - DNA, 20 bp, Artificial Sequence
  Description of Artificial Sequence: Synthetic oligonucleotide
  Target: ANGPTL4; (+) strand; PAM type: YTN; PAM sequence: TTC
tttccctccttccttccttc

SEQ ID NO: 16833 - DNA, 20 bp, Artificial Sequence
  Description of Artificial Sequence: Synthetic oligonucleotide
  Target: ANGPTL4; (+) strand; PAM type: YTN; PAM sequence: CTT
tccctccttccttccttcct

SEQ ID NO: 16834 - DNA, 20 bp, Artificial Sequence
  Description of Artificial Sequence: Synthetic oligonucleotide
  Target: ANGPTL4; (+) strand; PAM type: YTN; PAM sequence: TTT
ccctccttccttccttcctc

SEQ ID NO: 16835 - DNA, 20 bp, Artificial Sequence
  Description of Artificial Sequence: Synthetic oligonucleotide
  Target: ANGPTL4; (+) strand; PAM type: YTN; PAM sequence: TTC
cctccttccttccttcctct

SEQ ID NO: 16836 - DNA, 20 bp, Artificial Sequence
  Description of Artificial Sequence: Synthetic oligonucleotide
  Target: ANGPTL4; (+) strand; PAM type: YTN; PAM sequence: CTC
cttccttccttcctctttct

SEQ ID NO: 16837 - DNA, 20 bp, Artificial Sequence
  Description of Artificial Sequence: Synthetic oligonucleotide
  Target: ANGPTL4; (+) strand; PAM type: YTN; PAM sequence: CTT
ccttccttcctctttctctc

SEQ ID NO: 16838 - DNA, 20 bp, Artificial Sequence
  Description of Artificial Sequence: Synthetic oligonucleotide
  Target: ANGPTL4; (+) strand; PAM type: YTN; PAM sequence: TTC
cttccttcctctttctctct

SEQ ID NO: 16839 - DNA, 20 bp, Artificial Sequence
  Description of Artificial Sequence: Synthetic oligonucleotide
  Target: ANGPTL4; (+) strand; PAM type: YTN; PAM sequence: CTT
ccttcctctttctctctttc

SEQ ID NO: 16840 - DNA, 20 bp, Artificial Sequence
  Description of Artificial Sequence: Synthetic oligonucleotide
  Target: ANGPTL4; (+) strand; PAM type: YTN; PAM sequence: TTC
cttcctctttctctctttcc

SEQ ID NO: 16841 - DNA, 20 bp, Artificial Sequence
  Description of Artificial Sequence: Synthetic oligonucleotide
  Target: ANGPTL4; (+) strand; PAM type: YTN; PAM sequence: CTT
cctctttctctctttccttt

SEQ ID NO: 16842 - DNA, 20 bp, Artificial Sequence
  Description of Artificial Sequence: Synthetic oligonucleotide
  Target: ANGPTL4; (+) strand; PAM type: YTN; PAM sequence: TTC
ctctttctctctttcctttc

SEQ ID NO: 16843 - DNA, 20 bp, Artificial Sequence
  Description of Artificial Sequence: Synthetic oligonucleotide
  Target: ANGPTL4; (+) strand; PAM type: YTN; PAM sequence: CTC
tttctctctttcctttctct

SEQ ID NO: 16844 - DNA, 20 bp, Artificial Sequence
  Description of Artificial Sequence: Synthetic oligonucleotide
  Target: ANGPTL4; (+) strand; PAM type: YTN; PAM sequence: CTT
tctctctttcctttctctct

SEQ ID NO: 16845 - DNA, 20 bp, Artificial Sequence
  Description of Artificial Sequence: Synthetic oligonucleotide
  Target: ANGPTL4; (+) strand; PAM type: YTN; PAM sequence: TTT
ctctctttcctttctctctc

SEQ ID NO: 16846 - DNA, 20 bp, Artificial Sequence
  Description of Artificial Sequence: Synthetic oligonucleotide
  Target: ANGPTL4; (+) strand; PAM type: YTN; PAM sequence: TTC
tctctttcctttctctctct

SEQ ID NO: 16847 - DNA, 20 bp, Artificial Sequence
  Description of Artificial Sequence: Synthetic oligonucleotide
  Target: ANGPTL4; (+) strand; PAM type: YTN; PAM sequence: CTC
tctttcctttctctctctct

SEQ ID NO: 16848 - DNA, 20 bp, Artificial Sequence
  Description of Artificial Sequence: Synthetic oligonucleotide
  Target: ANGPTL4; (+) strand; PAM type: YTN; PAM sequence: CTC
tttcctttctctctctcttt

SEQ ID NO: 16849 - DNA, 20 bp, Artificial Sequence
  Description of Artificial Sequence: Synthetic oligonucleotide
  Target: ANGPTL4; (+) strand; PAM type: YTN; PAM sequence: CTT
tcctttctctctctcttttc

SEQ ID NO: 16850 - DNA, 20 bp, Artificial Sequence
  Description of Artificial Sequence: Synthetic oligonucleotide
  Target: ANGPTL4; (+) strand; PAM type: YTN; PAM sequence: TTT
cctttctctctctcttttct

SEQ ID NO: 16851 - DNA, 20 bp, Artificial Sequence
  Description of Artificial Sequence: Synthetic oligonucleotide
  Target: ANGPTL4; (+) strand; PAM type: YTN; PAM sequence: TTC
ctttctctctctcttttctc

SEQ ID NO: 16852 - DNA, 20 bp, Artificial Sequence
  Description of Artificial Sequence: Synthetic oligonucleotide
  Target: ANGPTL4; (+) strand; PAM type: YTN; PAM sequence: CTT
tctctctctcttttctctct

SEQ ID NO: 16853 - DNA, 20 bp, Artificial Sequence
  Description of Artificial Sequence: Synthetic oligonucleotide
  Target: ANGPTL4; (+) strand; PAM type: YTN; PAM sequence: TTT
ctctctctcttttctctctc

SEQ ID NO: 16854 - DNA, 20 bp, Artificial Sequence
  Description of Artificial Sequence: Synthetic oligonucleotide
  Target: ANGPTL4; (+) strand; PAM type: YTN; PAM sequence: TTC
tctctctcttttctctctct

SEQ ID NO: 16855 - DNA, 20 bp, Artificial Sequence
  Description of Artificial Sequence: Synthetic oligonucleotide
  Target: ANGPTL4; (+) strand; PAM type: YTN; PAM sequence: CTC
tctctcttttctctctctct

SEQ ID NO: 16856 - DNA, 20 bp, Artificial Sequence
  Description of Artificial Sequence: Synthetic oligonucleotide
  Target: ANGPTL4; (+) strand; PAM type: YTN; PAM sequence: CTC
tctcttttctctctctctct

SEQ ID NO: 16857 - DNA, 20 bp, Artificial Sequence
  Description of Artificial Sequence: Synthetic oligonucleotide
  Target: ANGPTL4; (+) strand; PAM type: YTN; PAM sequence: CTC
tcttttctctctctctctcc

SEQ ID NO: 16858 - DNA, 20 bp, Artificial Sequence
  Description of Artificial Sequence: Synthetic oligonucleotide
  Target: ANGPTL4; (+) strand; PAM type: YTN; PAM sequence: CTC
ttttctctctctctctcctt

SEQ ID NO: 16859 - DNA, 20 bp, Artificial Sequence
  Description of Artificial Sequence: Synthetic oligonucleotide
  Target: ANGPTL4; (+) strand; PAM type: YTN; PAM sequence: CTT
ttctctctctctctccttct

SEQ ID NO: 16860 - DNA, 20 bp, Artificial Sequence
  Description of Artificial Sequence: Synthetic oligonucleotide
  Target: ANGPTL4; (+) strand; PAM type: YTN; PAM sequence: TTT
tctctctctctctccttctt

SEQ ID NO: 16861 - DNA, 20 bp, Artificial Sequence
  Description of Artificial Sequence: Synthetic oligonucleotide
  Target: ANGPTL4; (+) strand; PAM type: YTN; PAM sequence: TTT
ctctctctctctccttcttc

SEQ ID NO: 16862 - DNA, 20 bp, Artificial Sequence
  Description of Artificial Sequence: Synthetic oligonucleotide
  Target: ANGPTL4; (+) strand; PAM type: YTN; PAM sequence: TTC
tctctctctctccttcttcc

SEQ ID NO: 16863 - DNA, 20 bp, Artificial Sequence
  Description of Artificial Sequence: Synthetic oligonucleotide
  Target: ANGPTL4; (+) strand; PAM type: YTN; PAM sequence: CTC
tctctctctccttcttccct

SEQ ID NO: 16864 - DNA, 20 bp, Artificial Sequence
  Description of Artificial Sequence: Synthetic oligonucleotide
  Target: ANGPTL4; (+) strand; PAM type: YTN; PAM sequence: CTC
tctctctccttcttccctcc

SEQ ID NO: 16865 - DNA, 20 bp, Artificial Sequence
  Description of Artificial Sequence: Synthetic oligonucleotide
  Target: ANGPTL4; (+) strand; PAM type: YTN; PAM sequence: CTC
tctctccttcttccctccct

SEQ ID NO: 16866 - DNA, 20 bp, Artificial Sequence
  Description of Artificial Sequence: Synthetic oligonucleotide
  Target: ANGPTL4; (+) strand; PAM type: YTN; PAM sequence: CTC
tctccttcttccctccctcc

SEQ ID NO: 16867 - DNA, 20 bp, Artificial Sequence
  Description of Artificial Sequence: Synthetic oligonucleotide
  Target: ANGPTL4; (+) strand; PAM type: YTN; PAM sequence: CTC
tccttcttccctccctccct

SEQ ID NO: 16868 - DNA, 20 bp, Artificial Sequence
  Description of Artificial Sequence: Synthetic oligonucleotide
  Target: ANGPTL4; (+) strand; PAM type: YTN; PAM sequence: CTC
cttcttccctccctccctac

SEQ ID NO: 16869 - DNA, 20 bp, Artificial Sequence
  Description of Artificial Sequence: Synthetic oligonucleotide
  Target: ANGPTL4; (+) strand; PAM type: YTN; PAM sequence: CTT
cttccctccctccctacctc

SEQ ID NO: 16870 - DNA, 20 bp, Artificial Sequence
  Description of Artificial Sequence: Synthetic oligonucleotide
  Target: ANGPTL4; (+) strand; PAM type: YTN; PAM sequence: TTC
ttccctccctccctacctct

SEQ ID NO: 16871 - DNA, 20 bp, Artificial Sequence
  Description of Artificial Sequence: Synthetic oligonucleotide
  Target: ANGPTL4; (+) strand; PAM type: YTN; PAM sequence: CTT
ccctccctccctacctctct

SEQ ID NO: 16872 - DNA, 20 bp, Artificial Sequence
  Description of Artificial Sequence: Synthetic oligonucleotide
  Target: ANGPTL4; (+) strand; PAM type: YTN; PAM sequence: TTC
cctccctccctacctctctc

SEQ ID NO: 16873 - DNA, 20 bp, Artificial Sequence
  Description of Artificial Sequence: Synthetic oligonucleotide
  Target: ANGPTL4; (+) strand; PAM type: YTN; PAM sequence: CTC
cctccctacctctctctctt

SEQ ID NO: 16874 - DNA, 20 bp, Artificial Sequence
  Description of Artificial Sequence: Synthetic oligonucleotide
  Target: ANGPTL4; (+) strand; PAM type: YTN; PAM sequence: CTC
cctacctctctctcttttct

SEQ ID NO: 16875 - DNA, 20 bp, Artificial Sequence
  Description of Artificial Sequence: Synthetic oligonucleotide
  Target: ANGPTL4; (+) strand; PAM type: YTN; PAM sequence: CTA
cctctctctcttttcttttt

SEQ ID NO: 16876 - DNA, 20 bp, Artificial Sequence
  Description of Artificial Sequence: Synthetic oligonucleotide
  Target: ANGPTL4; (+) strand; PAM type: YTN; PAM sequence: CTC
tctctcttttctttttccgt

SEQ ID NO: 16877 - DNA, 20 bp, Artificial Sequence
  Description of Artificial Sequence: Synthetic oligonucleotide
  Target: ANGPTL4; (+) strand; PAM type: YTN; PAM sequence: CTC
tctcttttctttttccgtcc

SEQ ID NO: 16878 - DNA, 20 bp, Artificial Sequence
  Description of Artificial Sequence: Synthetic oligonucleotide
  Target: ANGPTL4; (+) strand; PAM type: YTN; PAM sequence: CTC
tcttttctttttccgtcctt

SEQ ID NO: 16879 - DNA, 20 bp, Artificial Sequence
  Description of Artificial Sequence: Synthetic oligonucleotide
  Target: ANGPTL4; (+) strand; PAM type: YTN; PAM sequence: CTC
ttttctttttccgtccttcc

SEQ ID NO: 16880 - DNA, 20 bp, Artificial Sequence
  Description of Artificial Sequence: Synthetic oligonucleotide
  Target: ANGPTL4; (+) strand; PAM type: YTN; PAM sequence: CTT
ttctttttccgtccttcctt

SEQ ID NO: 16881 - DNA, 20 bp, Artificial Sequence
  Description of Artificial Sequence: Synthetic oligonucleotide
  Target: ANGPTL4; (+) strand; PAM type: YTN; PAM sequence: TTT
tctttttccgtccttccttc

SEQ ID NO: 16882 - DNA, 20 bp, Artificial Sequence
  Description of Artificial Sequence: Synthetic oligonucleotide
  Target: ANGPTL4; (+) strand; PAM type: YTN; PAM sequence: TTT
ctttttccgtccttccttcc

SEQ ID NO: 16883 - DNA, 20 bp, Artificial Sequence
  Description of Artificial Sequence: Synthetic oligonucleotide
  Target: ANGPTL4; (+) strand; PAM type: YTN; PAM sequence: TTC
tttttccgtccttccttcct

SEQ ID NO: 16884 - DNA, 20 bp, Artificial Sequence
  Description of Artificial Sequence: Synthetic oligonucleotide
  Target: ANGPTL4; (+) strand; PAM type: YTN; PAM sequence: CTT
tttccgtccttccttccttc

SEQ ID NO: 16885 - DNA, 20 bp, Artificial Sequence
  Description of Artificial Sequence: Synthetic oligonucleotide
  Target: ANGPTL4; (+) strand; PAM type: YTN; PAM sequence: TTT
ttccgtccttccttccttct

SEQ ID NO: 16886 - DNA, 20 bp, Artificial Sequence
  Description of Artificial Sequence: Synthetic oligonucleotide
  Target: ANGPTL4; (+) strand; PAM type: YTN; PAM sequence: TTT
tccgtccttccttccttctt

SEQ ID NO: 16887 - DNA, 20 bp, Artificial Sequence
  Description of Artificial Sequence: Synthetic oligonucleotide
  Target: ANGPTL4; (+) strand; PAM type: YTN; PAM sequence: TTT
ccgtccttccttccttcttt

SEQ ID NO: 16888 - DNA, 20 bp, Artificial Sequence
  Description of Artificial Sequence: Synthetic oligonucleotide
  Target: ANGPTL4; (+) strand; PAM type: YTN; PAM sequence: TTC
cgtccttccttccttctttc

SEQ ID NO: 16889 - DNA, 20 bp, Artificial Sequence
  Description of Artificial Sequence: Synthetic oligonucleotide
  Target: ANGPTL4; (+) strand; PAM type: YTN; PAM sequence: CTT
ccttccttctttccttcttt

SEQ ID NO: 16890 - DNA, 20 bp, Artificial Sequence
  Description of Artificial Sequence: Synthetic oligonucleotide
  Target: ANGPTL4; (+) strand; PAM type: YTN; PAM sequence: TTC
cttccttctttccttctttc

SEQ ID NO: 16891 - DNA, 20 bp, Artificial Sequence
  Description of Artificial Sequence: Synthetic oligonucleotide
  Target: ANGPTL4; (+) strand; PAM type: YTN; PAM sequence: CTT
ccttctttccttctttctct

SEQ ID NO: 16892 - DNA, 20 bp, Artificial Sequence
  Description of Artificial Sequence: Synthetic oligonucleotide
  Target: ANGPTL4; (+) strand; PAM type: YTN; PAM sequence: TTC
cttctttccttctttctctc

SEQ ID NO: 16893 - DNA, 20 bp, Artificial Sequence
  Description of Artificial Sequence: Synthetic oligonucleotide
  Target: ANGPTL4; (+) strand; PAM type: YTN; PAM sequence: CTT
ctttccttctttctctctct

SEQ ID NO: 16894 - DNA, 20 bp, Artificial Sequence
  Description of Artificial Sequence: Synthetic oligonucleotide
  Target: ANGPTL4; (+) strand; PAM type: YTN; PAM sequence: TTC
tttccttctttctctctctt

SEQ ID NO: 16895 - DNA, 20 bp, Artificial Sequence
  Description of Artificial Sequence: Synthetic oligonucleotide
  Target: ANGPTL4; (+) strand; PAM type: YTN; PAM sequence: CTT
tccttctttctctctctttt

SEQ ID NO: 16896 - DNA, 20 bp, Artificial Sequence
  Description of Artificial Sequence: Synthetic oligonucleotide
  Target: ANGPTL4; (+) strand; PAM type: YTN; PAM sequence: TTT
ccttctttctctctcttttc

SEQ ID NO: 16897 - DNA, 20 bp, Artificial Sequence
  Description of Artificial Sequence: Synthetic oligonucleotide
  Target: ANGPTL4; (+) strand; PAM type: YTN; PAM sequence: TTC
cttctttctctctcttttct

SEQ ID NO: 16898 - DNA, 20 bp, Artificial Sequence
  Description of Artificial Sequence: Synthetic oligonucleotide
  Target: ANGPTL4; (+) strand; PAM type: YTN; PAM sequence: CTT
ctttctctctcttttctttc

SEQ ID NO: 16899 - DNA, 20 bp, Artificial Sequence
  Description of Artificial Sequence: Synthetic oligonucleotide
  Target: ANGPTL4; (+) strand; PAM type: YTN; PAM sequence: TTC
tttctctctcttttctttct

SEQ ID NO: 16900 - DNA, 20 bp, Artificial Sequence
  Description of Artificial Sequence: Synthetic oligonucleotide
  Target: ANGPTL4; (+) strand; PAM type: YTN; PAM sequence: CTT
tctctctcttttctttcttt

SEQ ID NO: 16901 - DNA, 20 bp, Artificial Sequence
  Description of Artificial Sequence: Synthetic oligonucleotide
  Target: ANGPTL4; (+) strand; PAM type: YTN; PAM sequence: TTT
ctctctcttttctttctttt

SEQ ID NO: 16902 - DNA, 20 bp, Artificial Sequence
  Description of Artificial Sequence: Synthetic oligonucleotide
  Target: ANGPTL4; (+) strand; PAM type: YTN; PAM sequence: TTC
tctctcttttctttcttttc

SEQ ID NO: 16903 - DNA, 20 bp, Artificial Sequence
  Description of Artificial Sequence: Synthetic oligonucleotide
  Target: ANGPTL4; (+) strand; PAM type: YTN; PAM sequence: CTC
tctcttttctttcttttctt

SEQ ID NO: 16904 - DNA, 20 bp, Artificial Sequence
  Description of Artificial Sequence: Synthetic oligonucleotide
  Target: ANGPTL4; (+) strand; PAM type: YTN; PAM sequence: CTC
tcttttctttcttttctttt

SEQ ID NO: 16905 - DNA, 20 bp, Artificial Sequence
  Description of Artificial Sequence: Synthetic oligonucleotide
  Target: ANGPTL4; (+) strand; PAM type: YTN; PAM sequence: CTC
ttttctttcttttcttttct

SEQ ID NO: 16906 - DNA, 20 bp, Artificial Sequence
  Description of Artificial Sequence: Synthetic oligonucleotide
  Target: ANGPTL4; (+) strand; PAM type: YTN; PAM sequence: CTT
ttctttcttttcttttcttt

SEQ ID NO: 16907 - DNA, 20 bp, Artificial Sequence
  Description of Artificial Sequence: Synthetic oligonucleotide
  Target: ANGPTL4; (+) strand; PAM type: YTN; PAM sequence: TTT
tctttcttttcttttctttt

SEQ ID NO: 16908 - DNA, 20 bp, Artificial Sequence
  Description of Artificial Sequence: Synthetic oligonucleotide
  Target: ANGPTL4; (+) strand; PAM type: YTN; PAM sequence: TTT
ctttcttttcttttcttttc

SEQ ID NO: 16909 - DNA, 20 bp, Artificial Sequence
  Description of Artificial Sequence: Synthetic oligonucleotide
  Target: ANGPTL4; (+) strand; PAM type: YTN; PAM sequence: TTC
tttcttttcttttcttttct

SEQ ID NO: 16910 - DNA, 20 bp, Artificial Sequence
  Description of Artificial Sequence: Synthetic oligonucleotide
  Target: ANGPTL4; (+) strand; PAM type: YTN; PAM sequence: CTT
tcttttcttttcttttctct

SEQ ID NO: 16911 - DNA, 20 bp, Artificial Sequence
  Description of Artificial Sequence: Synthetic oligonucleotide
  Target: ANGPTL4; (+) strand; PAM type: YTN; PAM sequence: TTT
cttttcttttcttttctctt

SEQ ID NO: 16912 - DNA, 20 bp, Artificial Sequence
  Description of Artificial Sequence: Synthetic oligonucleotide
  Target: ANGPTL4; (+) strand; PAM type: YTN; PAM sequence: TTC
ttttcttttcttttctcttc

SEQ ID NO: 16913 - DNA, 20 bp, Artificial Sequence
  Description of Artificial Sequence: Synthetic oligonucleotide
  Target: ANGPTL4; (+) strand; PAM type: YTN; PAM sequence: CTT
ttcttttcttttctcttctt

SEQ ID NO: 16914 - DNA, 20 bp, Artificial Sequence
  Description of Artificial Sequence: Synthetic oligonucleotide
  Target: ANGPTL4; (+) strand; PAM type: YTN; PAM sequence: TTT
tcttttcttttctcttcttt

SEQ ID NO: 16915 - DNA, 20 bp, Artificial Sequence
  Description of Artificial Sequence: Synthetic oligonucleotide
  Target: ANGPTL4; (+) strand; PAM type: YTN; PAM sequence: TTT
cttttcttttctcttctttc

SEQ ID NO: 16916 - DNA, 20 bp, Artificial Sequence
  Description of Artificial Sequence: Synthetic oligonucleotide
  Target: ANGPTL4; (+) strand; PAM type: YTN; PAM sequence: TTC
ttttcttttctcttctttca

SEQ ID NO: 16917 - DNA, 20 bp, Artificial Sequence
  Description of Artificial Sequence: Synthetic oligonucleotide
  Target: ANGPTL4; (+) strand; PAM type: YTN; PAM sequence: CTT
ttcttttctcttctttcatt

SEQ ID NO: 16918 - DNA, 20 bp, Artificial Sequence
  Description of Artificial Sequence: Synthetic oligonucleotide
  Target: ANGPTL4; (+) strand; PAM type: YTN; PAM sequence: TTT
tcttttctcttctttcattt

SEQ ID NO: 16919 - DNA, 20 bp, Artificial Sequence
  Description of Artificial Sequence: Synthetic oligonucleotide
  Target: ANGPTL4; (+) strand; PAM type: YTN; PAM sequence: TTT
cttttctcttctttcatttt

SEQ ID NO: 16920 - DNA, 20 bp, Artificial Sequence
  Description of Artificial Sequence: Synthetic oligonucleotide
  Target: ANGPTL4; (+) strand; PAM type: YTN; PAM sequence: TTC
ttttctcttctttcattttg

SEQ ID NO: 16921 - DNA, 20 bp, Artificial Sequence
  Description of Artificial Sequence: Synthetic oligonucleotide
  Target: ANGPTL4; (+) strand; PAM type: YTN; PAM sequence: CTT
ttctcttctttcattttgag

SEQ ID NO: 16922 - DNA, 20 bp, Artificial Sequence
  Description of Artificial Sequence: Synthetic oligonucleotide
  Target: ANGPTL4; (+) strand; PAM type: YTN; PAM sequence: TTT
tctcttctttcattttgaga

SEQ ID NO: 16923 - DNA, 20 bp, Artificial Sequence
  Description of Artificial Sequence: Synthetic oligonucleotide
  Target: ANGPTL4; (+) strand; PAM type: YTN; PAM sequence: TTT
ctcttctttcattttgagac

SEQ ID NO: 16924 - DNA, 20 bp, Artificial Sequence
  Description of Artificial Sequence: Synthetic oligonucleotide
  Target: ANGPTL4; (+) strand; PAM type: YTN; PAM sequence: TTC
tcttctttcattttgagacg

SEQ ID NO: 16925 - DNA, 20 bp, Artificial Sequence
  Description of Artificial Sequence: Synthetic oligonucleotide
  Target: ANGPTL4; (+) strand; PAM type: YTN; PAM sequence: CTC
ttctttcattttgagacgta

SEQ ID NO: 16926 - DNA, 20 bp, Artificial Sequence
  Description of Artificial Sequence: Synthetic oligonucleotide
  Target: ANGPTL4; (+) strand; PAM type: YTN; PAM sequence: CTT
ctttcattttgagacgtact

SEQ ID NO: 16927 - DNA, 20 bp, Artificial Sequence
  Description of Artificial Sequence: Synthetic oligonucleotide
  Target: ANGPTL4; (+) strand; PAM type: YTN; PAM sequence: TTC
tttcattttgagacgtactc

SEQ ID NO: 16928 - DNA, 20 bp, Artificial Sequence
  Description of Artificial Sequence: Synthetic oligonucleotide
  Target: ANGPTL4; (+) strand; PAM type: YTN; PAM sequence: CTT
tcattttgagacgtactctg

SEQ ID NO: 16929 - DNA, 20 bp, Artificial Sequence
  Description of Artificial Sequence: Synthetic oligonucleotide
  Target: ANGPTL4; (+) strand; PAM type: YTN; PAM sequence: TTT
cattttgagacgtactctgg

SEQ ID NO: 16930 - DNA, 20 bp, Artificial Sequence
  Description of Artificial Sequence: Synthetic oligonucleotide
  Target: ANGPTL4; (+) strand; PAM type: YTN; PAM sequence: TTC
attttgagacgtactctggc

SEQ ID NO: 16931 - DNA, 20 bp, Artificial Sequence
  Description of Artificial Sequence: Synthetic oligonucleotide
  Target: ANGPTL4; (+) strand; PAM type: YTN; PAM sequence: TTT
tgagacgtactctggctctg

SEQ ID NO: 16932 - DNA, 20 bp, Artificial Sequence
  Description of Artificial Sequence: Synthetic oligonucleotide
  Target: ANGPTL4; (+) strand; PAM type: YTN; PAM sequence: TTT
gagacgtactctggctctgt

SEQ ID NO: 16933 - DNA, 20 bp, Artificial Sequence
  Description of Artificial Sequence: Synthetic oligonucleotide
  Target: ANGPTL4; (+) strand; PAM type: YTN; PAM sequence: TTG
agacgtactctggctctgtc

SEQ ID NO: 16934 - DNA, 20 bp, Artificial Sequence
  Description of Artificial Sequence: Synthetic oligonucleotide
  Target: ANGPTL4; (+) strand; PAM type: YTN; PAM sequence: CTC
tggctctgtcgcccaggctg

SEQ ID NO: 16935 - DNA, 20 bp, Artificial Sequence
  Description of Artificial Sequence: Synthetic oligonucleotide
  Target: ANGPTL4; (+) strand; PAM type: YTN; PAM sequence: CTG
gctctgtcgcccaggctgga

SEQ ID NO: 16936 - DNA, 20 bp, Artificial Sequence
  Description of Artificial Sequence: Synthetic oligonucleotide
  Target: ANGPTL4; (+) strand; PAM type: YTN; PAM sequence: CTC
tgtcgcccaggctggagcgc

SEQ ID NO: 16937 - DNA, 20 bp, Artificial Sequence
  Description of Artificial Sequence: Synthetic oligonucleotide
  Target: ANGPTL4; (+) strand; PAM type: YTN; PAM sequence: CTG
tcgcccaggctggagcgcaa

SEQ ID NO: 16938 - DNA, 20 bp, Artificial Sequence
  Description of Artificial Sequence: Synthetic oligonucleotide
  Target: ANGPTL4; (+) strand; PAM type: YTN; PAM sequence: CTG
gagcgcaatggcgccatctc

SEQ ID NO: 16939 - DNA, 20 bp, Artificial Sequence
  Description of Artificial Sequence: Synthetic oligonucleotide
  Target: ANGPTL4; (+) strand; PAM type: YTN; PAM sequence: CTC
ggcgcactgcaacctccacc

SEQ ID NO: 16940 - DNA, 20 bp, Artificial Sequence
  Description of Artificial Sequence: Synthetic oligonucleotide
  Target: ANGPTL4; (+) strand; PAM type: YTN; PAM sequence: CTG
caacctccacctcccgggtt

SEQ ID NO: 16941 - DNA, 20 bp, Artificial Sequence
  Description of Artificial Sequence: Synthetic oligonucleotide
  Target: ANGPTL4; (+) strand; PAM type: YTN; PAM sequence: CTC
cacctcccgggttcaagcga

SEQ ID NO: 16942 - DNA, 20 bp, Artificial Sequence
  Description of Artificial Sequence: Synthetic oligonucleotide
  Target: ANGPTL4; (+) strand; PAM type: YTN; PAM sequence: CTC
ccgggttcaagcgattctac

SEQ ID NO: 16943 - DNA, 20 bp, Artificial Sequence
  Description of Artificial Sequence: Synthetic oligonucleotide
  Target: ANGPTL4; (+) strand; PAM type: YTN; PAM sequence: TTC
aagcgattctactgcctcag

SEQ ID NO: 16944 - DNA, 20 bp, Artificial Sequence
  Description of Artificial Sequence: Synthetic oligonucleotide
  Target: ANGPTL4; (+) strand; PAM type: YTN; PAM sequence: TTC
tactgcctcagcctcccgag

SEQ ID NO: 16945 - DNA, 20 bp, Artificial Sequence
  Description of Artificial Sequence: Synthetic oligonucleotide
  Target: ANGPTL4; (+) strand; PAM type: YTN; PAM sequence: CTA
ctgcctcagcctcccgagta

SEQ ID NO: 16946 - DNA, 20 bp, Artificial Sequence
  Description of Artificial Sequence: Synthetic oligonucleotide
  Target: ANGPTL4; (+) strand; PAM type: YTN; PAM sequence: CTG
cctcagcctcccgagtagct

SEQ ID NO: 16947 - DNA, 20 bp, Artificial Sequence
  Description of Artificial Sequence: Synthetic oligonucleotide
  Target: ANGPTL4; (+) strand; PAM type: YTN; PAM sequence: CTC
agcctcccgagtagctggga

SEQ ID NO: 16948 - DNA, 20 bp, Artificial Sequence
  Description of Artificial Sequence: Synthetic oligonucleotide
  Target: ANGPTL4; (+) strand; PAM type: YTN; PAM sequence: CTC
ccgagtagctgggactacag

SEQ ID NO: 16949 - DNA, 20 bp, Artificial Sequence
  Description of Artificial Sequence: Synthetic oligonucleotide
  Target: ANGPTL4; (+) strand; PAM type: YTN; PAM sequence: CTG
ggactacaggcgcgcactac

SEQ ID NO: 16950 - DNA, 20 bp, Artificial Sequence
  Description of Artificial Sequence: Synthetic oligonucleotide
  Target: ANGPTL4; (+) strand; PAM type: YTN; PAM sequence: CTA
caggcgcgcactaccaagcc

SEQ ID NO: 16951 - DNA, 20 bp, Artificial Sequence
  Description of Artificial Sequence: Synthetic oligonucleotide
  Target: ANGPTL4; (+) strand; PAM type: YTN; PAM sequence: CTA
ccaagcccggctaatttttt

SEQ ID NO: 16952 - DNA, 20 bp, Artificial Sequence
  Description of Artificial Sequence: Synthetic oligonucleotide
  Target: ANGPTL4; (+) strand; PAM type: YTN; PAM sequence: CTA
atttttttttgtatttttag

SEQ ID NO: 16953 - DNA, 20 bp, Artificial Sequence
  Description of Artificial Sequence: Synthetic oligonucleotide
  Target: ANGPTL4; (+) strand; PAM type: YTN; PAM sequence: TTT
ttttttgtatttttagtaga

SEQ ID NO: 16954 - DNA, 20 bp, Artificial Sequence
  Description of Artificial Sequence: Synthetic oligonucleotide
  Target: ANGPTL4; (+) strand; PAM type: YTN; PAM sequence: TTT
tttttgtatttttagtagag

SEQ ID NO: 16955 - DNA, 20 bp, Artificial Sequence
  Description of Artificial Sequence: Synthetic oligonucleotide
  Target: ANGPTL4; (+) strand; PAM type: YTN; PAM sequence: TTT
ttttgtatttttagtagaga

SEQ ID NO: 16956 - DNA, 20 bp, Artificial Sequence
  Description of Artificial Sequence: Synthetic oligonucleotide
  Target: ANGPTL4; (+) strand; PAM type: YTN; PAM sequence: TTT
tttgtatttttagtagagac

SEQ ID NO: 16957 - DNA, 20 bp, Artificial Sequence
  Description of Artificial Sequence: Synthetic oligonucleotide
  Target: ANGPTL4; (+) strand; PAM type: YTN; PAM sequence: TTT
ttgtatttttagtagagact

SEQ ID NO: 16958 - DNA, 20 bp, Artificial Sequence
  Description of Artificial Sequence: Synthetic oligonucleotide
  Target: ANGPTL4; (+) strand; PAM type: YTN; PAM sequence: TTT
tgtatttttagtagagactg

SEQ ID NO: 16959 - DNA, 20 bp, Artificial Sequence
  Description of Artificial Sequence: Synthetic oligonucleotide
  Target: ANGPTL4; (+) strand; PAM type: YTN; PAM sequence: TTT
gtatttttagtagagactgg

SEQ ID NO: 16960 - DNA, 20 bp, Artificial Sequence
  Description of Artificial Sequence: Synthetic oligonucleotide
  Target: ANGPTL4; (+) strand; PAM type: YTN; PAM sequence: TTG
tatttttagtagagactggg

SEQ ID NO: 16961 - DNA, 20 bp, Artificial Sequence
  Description of Artificial Sequence: Synthetic oligonucleotide
  Target: ANGPTL4; (+) strand; PAM type: YTN; PAM sequence: TTT
ttagtagagactgggtttca

SEQ ID NO: 16962 - DNA, 20 bp, Artificial Sequence
  Description of Artificial Sequence: Synthetic oligonucleotide
  Target: ANGPTL4; (+) strand; PAM type: YTN; PAM sequence: TTT
tagtagagactgggtttcac

SEQ ID NO: 16963 - DNA, 20 bp, Artificial Sequence
  Description of Artificial Sequence: Synthetic oligonucleotide
  Target: ANGPTL4; (+) strand; PAM type: YTN; PAM sequence: TTT
agtagagactgggtttcacg

SEQ ID NO: 16964 - DNA, 20 bp, Artificial Sequence
  Description of Artificial Sequence: Synthetic oligonucleotide
  Target: ANGPTL4; (+) strand; PAM type: YTN; PAM sequence: TTA
gtagagactgggtttcacga

SEQ ID NO: 16965 - DNA, 20 bp, Artificial Sequence
  Description of Artificial Sequence: Synthetic oligonucleotide
  Target: ANGPTL4; (+) strand; PAM type: YTN; PAM sequence: CTG
ggtttcacgatgttggccgg

SEQ ID NO: 16966 - DNA, 20 bp, Artificial Sequence
  Description of Artificial Sequence: Synthetic oligonucleotide
  Target: ANGPTL4; (+) strand; PAM type: YTN; PAM sequence: TTT
cacgatgttggccgggctgg

SEQ ID NO: 16967 - DNA, 20 bp, Artificial Sequence
  Description of Artificial Sequence: Synthetic oligonucleotide
  Target: ANGPTL4; (+) strand; PAM type: YTN; PAM sequence: TTC
acgatgttggccgggctggt

SEQ ID NO: 16968 - DNA, 20 bp, Artificial Sequence
  Description of Artificial Sequence: Synthetic oligonucleotide
  Target: ANGPTL4; (+) strand; PAM type: YTN; PAM sequence: TTG
gccgggctggtctggaagtc

SEQ ID NO: 16969 - DNA, 20 bp, Artificial Sequence
  Description of Artificial Sequence: Synthetic oligonucleotide
  Target: ANGPTL4; (+) strand; PAM type: YTN; PAM sequence: CTG
gtctggaagtcttgacctca

SEQ ID NO: 16970 - DNA, 20 bp, Artificial Sequence
  Description of Artificial Sequence: Synthetic oligonucleotide
  Target: ANGPTL4; (+) strand; PAM type: YTN; PAM sequence: CTG
gaagtcttgacctcaagcgt

SEQ ID NO: 16971 - DNA, 20 bp, Artificial Sequence
  Description of Artificial Sequence: Synthetic oligonucleotide
  Target: ANGPTL4; (+) strand; PAM type: YTN; PAM sequence: CTT
gacctcaagcgtgcgccctc

SEQ ID NO: 16972 - DNA, 20 bp, Artificial Sequence
  Description of Artificial Sequence: Synthetic oligonucleotide
  Target: ANGPTL4; (+) strand; PAM type: YTN; PAM sequence: TTG
acctcaagcgtgcgccctct

SEQ ID NO: 16973 - DNA, 20 bp, Artificial Sequence
  Description of Artificial Sequence: Synthetic oligonucleotide
  Target: ANGPTL4; (+) strand; PAM type: YTN; PAM sequence: CTC
aagcgtgcgccctctccgcc

SEQ ID NO: 16974 - DNA, 20 bp, Artificial Sequence
  Description of Artificial Sequence: Synthetic oligonucleotide
  Target: ANGPTL4; (+) strand; PAM type: YTN; PAM sequence: CTC
tccgccactgggtaaggcgg

SEQ ID NO: 16975 - DNA, 20 bp, Artificial Sequence
  Description of Artificial Sequence: Synthetic oligonucleotide
  Target: ANGPTL4; (+) strand; PAM type: YTN; PAM sequence: CTC
cgccactgggtaaggcgggg

SEQ ID NO: 16976 - DNA, 20 bp, Artificial Sequence
  Description of Artificial Sequence: Synthetic oligonucleotide
  Target: ANGPTL4; (+) strand; PAM type: YTN; PAM sequence: CTG
ggtaaggcgggggcggaata

SEQ ID NO: 16977 - DNA, 20 bp, Artificial Sequence
  Description of Artificial Sequence: Synthetic oligonucleotide
  Target: ANGPTL4; (+) strand; PAM type: YTN; PAM sequence: CTT
gcaatttcacactagaggcg

SEQ ID NO: 16978 - DNA, 20 bp, Artificial Sequence
  Description of Artificial Sequence: Synthetic oligonucleotide
  Target: ANGPTL4; (+) strand; PAM type: YTN; PAM sequence: TTG
caatttcacactagaggcgg

SEQ ID NO: 16979 - DNA, 20 bp, Artificial Sequence
  Description of Artificial Sequence: Synthetic oligonucleotide
  Target: ANGPTL4; (+) strand; PAM type: YTN; PAM sequence: TTT
cacactagaggcgggcaccg

SEQ ID NO: 16980 - DNA, 20 bp, Artificial Sequence
  Description of Artificial Sequence: Synthetic oligonucleotide
  Target: ANGPTL4; (+) strand; PAM type: YTN; PAM sequence: TTC
acactagaggcgggcaccgt

SEQ ID NO: 16981 - DNA, 20 bp, Artificial Sequence
  Description of Artificial Sequence: Synthetic oligonucleotide
  Target: ANGPTL4; (+) strand; PAM type: YTN; PAM sequence: CTA
gaggcgggcaccgtggggga

SEQ ID NO: 16982 - DNA, 20 bp, Artificial Sequence
  Description of Artificial Sequence: Synthetic oligonucleotide
  Target: ANGPTL4; (+) strand; PAM type: YTN; PAM sequence: CTC
ccacggttcgtagaggaagg

SEQ ID NO: 16983 - DNA, 20 bp, Artificial Sequence
  Description of Artificial Sequence: Synthetic oligonucleotide
  Target: ANGPTL4; (+) strand; PAM type: YTN; PAM sequence: TTC
gtagaggaaggcctgcctga

SEQ ID NO: 16984 - DNA, 20 bp, Artificial Sequence
  Description of Artificial Sequence: Synthetic oligonucleotide
  Target: ANGPTL4; (+) strand; PAM type: YTN; PAM sequence: CTG
cctgagcctggagcgggggc

SEQ ID NO: 16985 - DNA, 20 bp, Artificial Sequence
  Description of Artificial Sequence: Synthetic oligonucleotide
  Target: ANGPTL4; (+) strand; PAM type: YTN; PAM sequence: CTG
agcctggagcgggggcggga

SEQ ID NO: 16986 - DNA, 20 bp, Artificial Sequence
  Description of Artificial Sequence: Synthetic oligonucleotide
  Target: ANGPTL4; (+) strand; PAM type: YTN; PAM sequence: CTG
gagcgggggcgggagagcca

SEQ ID NO: 16987 - DNA, 20 bp, Artificial Sequence
  Description of Artificial Sequence: Synthetic oligonucleotide
  Target: ANGPTL4; (+) strand; PAM type: YTN; PAM sequence: TTT
ggcatccccagggcatcccc

SEQ ID NO: 16988 - DNA, 20 bp, Artificial Sequence
  Description of Artificial Sequence: Synthetic oligonucleotide
  Target: ANGPTL4; (+) strand; PAM type: YTN; PAM sequence: TTG
gcatccccagggcatccccc

SEQ ID NO: 16989 - DNA, 20 bp, Artificial Sequence
  Description of Artificial Sequence: Synthetic oligonucleotide
  Target: ANGPTL4; (+) strand; PAM type: YTN; PAM sequence: CTA
ccaggcctccagaggacagg

SEQ ID NO: 16990 - DNA, 20 bp, Artificial Sequence
  Description of Artificial Sequence: Synthetic oligonucleotide
  Target: ANGPTL4; (+) strand; PAM type: YTN; PAM sequence: CTC
cagaggacaggaccccaccc

SEQ ID NO: 16991 - DNA, 20 bp, Artificial Sequence
  Description of Artificial Sequence: Synthetic oligonucleotide
  Target: ANGPTL4; (+) strand; PAM type: YTN; PAM sequence: CTG
cccccagcactccccgcacc

SEQ ID NO: 16992 - DNA, 20 bp, Artificial Sequence
  Description of Artificial Sequence: Synthetic oligonucleotide
  Target: ANGPTL4; (+) strand; PAM type: YTN; PAM sequence: CTC
cccgcaccccgcctccaaga

SEQ ID NO: 16993 - DNA, 20 bp, Artificial Sequence
  Description of Artificial Sequence: Synthetic oligonucleotide
  Target: ANGPTL4; (+) strand; PAM type: YTN; PAM sequence: CTC
caagactcctccgcccactc

SEQ ID NO: 16994 - DNA, 20 bp, Artificial Sequence
  Description of Artificial Sequence: Synthetic oligonucleotide
  Target: ANGPTL4; (+) strand; PAM type: YTN; PAM sequence: CTC
ctccgcccactccgcaccca

SEQ ID NO: 16995 - DNA, 20 bp, Artificial Sequence
  Description of Artificial Sequence: Synthetic oligonucleotide
  Target: ANGPTL4; (+) strand; PAM type: YTN; PAM sequence: CTC
cgcccactccgcacccaact

SEQ ID NO: 16996 - DNA, 20 bp, Artificial Sequence
  Description of Artificial Sequence: Synthetic oligonucleotide
  Target: ANGPTL4; (+) strand; PAM type: YTN; PAM sequence: CTC
cgcacccaacttataaaaac

SEQ ID NO: 16997 - DNA, 20 bp, Artificial Sequence
  Description of Artificial Sequence: Synthetic oligonucleotide
  Target: ANGPTL4; (+) strand; PAM type: YTN; PAM sequence: CTT
ataaaaaccgtcctcgggcg

SEQ ID NO: 16998 - DNA, 20 bp, Artificial Sequence
  Description of Artificial Sequence: Synthetic oligonucleotide
  Target: ANGPTL4; (+) strand; PAM type: YTN; PAM sequence: TTA
taaaaaccgtcctcgggcgc

SEQ ID NO: 16999 - DNA, 20 bp, Artificial Sequence
  Description of Artificial Sequence: Synthetic oligonucleotide
  Target: ANGPTL4; (+) strand; PAM type: YTN; PAM sequence: CTC
gggcgcggcggggagaagcc

SEQ ID NO: 17000 - DNA, 20 bp, Artificial Sequence
  Description of Artificial Sequence: Synthetic oligonucleotide
  Target: ANGPTL4; (+) strand; PAM type: YTN; PAM sequence: CTG
agcggatcctcacacgactg

SEQ ID NO: 17001 - DNA, 20 bp, Artificial Sequence
  Description of Artificial Sequence: Synthetic oligonucleotide
  Target: ANGPTL4; (+) strand; PAM type: YTN; PAM sequence: CTC
acacgactgtgatccgattc

SEQ ID NO: 17002 - DNA, 20 bp, Artificial Sequence
  Description of Artificial Sequence: Synthetic oligonucleotide
  Target: ANGPTL4; (+) strand; PAM type: YTN; PAM sequence: CTG
tgatccgattctttccagcg

SEQ ID NO: 17003 - DNA, 20 bp, Artificial Sequence
  Description of Artificial Sequence: Synthetic oligonucleotide
  Target: ANGPTL4; (+) strand; PAM type: YTN; PAM sequence: TTC
tttccagcggcttctgcaac

SEQ ID NO: 17004 - DNA, 20 bp, Artificial Sequence
  Description of Artificial Sequence: Synthetic oligonucleotide
  Target: ANGPTL4; (+) strand; PAM type: YTN; PAM sequence: CTT
tccagcggcttctgcaacca

SEQ ID NO: 17005 - DNA, 20 bp, Artificial Sequence
  Description of Artificial Sequence: Synthetic oligonucleotide
  Target: ANGPTL4; (+) strand; PAM type: YTN; PAM sequence: TTT
ccagcggcttctgcaaccaa

SEQ ID NO: 17006 - DNA, 20 bp, Artificial Sequence
  Description of Artificial Sequence: Synthetic oligonucleotide
  Target: ANGPTL4; (+) strand; PAM type: YTN; PAM sequence: TTC
cagcggcttctgcaaccaag

SEQ ID NO: 17007 - DNA, 20 bp, Artificial Sequence
  Description of Artificial Sequence: Synthetic oligonucleotide
  Target: ANGPTL4; (+) strand; PAM type: YTN; PAM sequence: CTT
ctgcaaccaagcgggtctta

SEQ ID NO: 17008 - DNA, 20 bp, Artificial Sequence
  Description of Artificial Sequence: Synthetic oligonucleotide
  Target: ANGPTL4; (+) strand; PAM type: YTN; PAM sequence: TTC
tgcaaccaagcgggtcttac

SEQ ID NO: 17009 - DNA, 20 bp, Artificial Sequence
  Description of Artificial Sequence: Synthetic oligonucleotide
  Target: ANGPTL4; (+) strand; PAM type: YTN; PAM sequence: CTG
caaccaagcgggtcttaccc

SEQ ID NO: 17010 - DNA, 20 bp, Artificial Sequence
  Description of Artificial Sequence: Synthetic oligonucleotide
  Target: ANGPTL4; (+) strand; PAM type: YTN; PAM sequence: CTT
acccccggtcctccgcgtct

SEQ ID NO: 17011 - DNA, 20 bp, Artificial Sequence
  Description of Artificial Sequence: Synthetic oligonucleotide
  Target: ANGPTL4; (+) strand; PAM type: YTN; PAM sequence: TTA
cccccggtcctccgcgtctc

SEQ ID NO: 17012 - DNA, 20 bp, Artificial Sequence
  Description of Artificial Sequence: Synthetic oligonucleotide
  Target: ANGPTL4; (+) strand; PAM type: YTN; PAM sequence: CTC
cgcgtctccagtcctcgcac

SEQ ID NO: 17013 - DNA, 20 bp, Artificial Sequence
  Description of Artificial Sequence: Synthetic oligonucleotide
  Target: ANGPTL4; (+) strand; PAM type: YTN; PAM sequence: CTC
cagtcctcgcacctggaacc

SEQ ID NO: 17014 - DNA, 20 bp, Artificial Sequence
  Description of Artificial Sequence: Synthetic oligonucleotide
  Target: ANGPTL4; (+) strand; PAM type: YTN; PAM sequence: CTC
gcacctggaaccccaacgtc

SEQ ID NO: 17015 - DNA, 20 bp, Artificial Sequence
  Description of Artificial Sequence: Synthetic oligonucleotide
  Target: ANGPTL4; (+) strand; PAM type: YTN; PAM sequence: CTG
gaaccccaacgtccccgaga

SEQ ID NO: 17016 - DNA, 20 bp, Artificial Sequence
  Description of Artificial Sequence: Synthetic oligonucleotide
  Target: ANGPTL4; (+) strand; PAM type: YTN; PAM sequence: CTC
ccaggctacctaagaggatg

SEQ ID NO: 17017 - DNA, 20 bp, Artificial Sequence
  Description of Artificial Sequence: Synthetic oligonucleotide
  Target: ANGPTL4; (+) strand; PAM type: YTN; PAM sequence: CTA
cctaagaggatgagcggtgc

SEQ ID NO: 17018 - DNA, 20 bp, Artificial Sequence
  Description of Artificial Sequence: Synthetic oligonucleotide
  Target: ANGPTL4; (+) strand; PAM type: YTN; PAM sequence: CTA
agaggatgagcggtgctccg

SEQ ID NO: 17019 - DNA, 20 bp, Artificial Sequence
  Description of Artificial Sequence: Synthetic oligonucleotide
  Target: ANGPTL4; (+) strand; PAM type: YTN; PAM sequence: CTC
cgacggccggggcagccctg

SEQ ID NO: 17020 - DNA, 20 bp, Artificial Sequence
  Description of Artificial Sequence: Synthetic oligonucleotide
  Target: ANGPTL4; (+) strand; PAM type: YTN; PAM sequence: CTG
atgctctgcgccgccaccgc

SEQ ID NO: 17021 - DNA, 20 bp, Artificial Sequence
  Description of Artificial Sequence: Synthetic oligonucleotide
  Target: ANGPTL4; (+) strand; PAM type: YTN; PAM sequence: CTC
tgcgccgccaccgccgtgct

SEQ ID NO: 17022 - DNA, 20 bp, Artificial Sequence
  Description of Artificial Sequence: Synthetic oligonucleotide
  Target: ANGPTL4; (+) strand; PAM type: YTN; PAM sequence: CTG
cgccgccaccgccgtgctac

SEQ ID NO: 17023 - DNA, 20 bp, Artificial Sequence
  Description of Artificial Sequence: Synthetic oligonucleotide
  Target: ANGPTL4; (+) strand; PAM type: YTN; PAM sequence: CTA
ctgagcgctcagggcggacc

SEQ ID NO: 17024 - DNA, 20 bp, Artificial Sequence
  Description of Artificial Sequence: Synthetic oligonucleotide
  Target: ANGPTL4; (+) strand; PAM type: YTN; PAM sequence: CTG
agcgctcagggcggacccgt

SEQ ID NO: 17025 - DNA, 20 bp, Artificial Sequence
  Description of Artificial Sequence: Synthetic oligonucleotide
  Target: ANGPTL4; (+) strand; PAM type: YTN; PAM sequence: CTC
agggcggacccgtgcagtcc

SEQ ID NO: 17026 - DNA, 20 bp, Artificial Sequence
  Description of Artificial Sequence: Synthetic oligonucleotide
  Target: ANGPTL4; (+) strand; PAM type: YTN; PAM sequence: CTT
tgcgtcctgggacgagatga

SEQ ID NO: 17027 - DNA, 20 bp, Artificial Sequence
  Description of Artificial Sequence: Synthetic oligonucleotide
  Target: ANGPTL4; (+) strand; PAM type: YTN; PAM sequence: TTT
gcgtcctgggacgagatgaa

SEQ ID NO: 17028 - DNA, 20 bp, Artificial Sequence
  Description of Artificial Sequence: Synthetic oligonucleotide
  Target: ANGPTL4; (+) strand; PAM type: YTN; PAM sequence: TTG
cgtcctgggacgagatgaat

SEQ ID NO: 17029 - DNA, 20 bp, Artificial Sequence
  Description of Artificial Sequence: Synthetic oligonucleotide
  Target: ANGPTL4; (+) strand; PAM type: YTN; PAM sequence: CTG
ggacgagatgaatgtcctgg

SEQ ID NO: 17030 - DNA, 20 bp, Artificial Sequence
  Description of Artificial Sequence: Synthetic oligonucleotide
  Target: ANGPTL4; (+) strand; PAM type: YTN; PAM sequence: CTG
gcgcacggactcctgcagct

SEQ ID NO: 17031 - DNA, 20 bp, Artificial Sequence
  Description of Artificial Sequence: Synthetic oligonucleotide
  Target: ANGPTL4; (+) strand; PAM type: YTN; PAM sequence: CTC
ctgcagctcggccaggggct

SEQ ID NO: 17032 - DNA, 20 bp, Artificial Sequence
  Description of Artificial Sequence: Synthetic oligonucleotide
  Target: ANGPTL4; (+) strand; PAM type: YTN; PAM sequence: CTG
cagctcggccaggggctgcg

SEQ ID NO: 17033 - DNA, 20 bp, Artificial Sequence
  Description of Artificial Sequence: Synthetic oligonucleotide
  Target: ANGPTL4; (+) strand; PAM type: YTN; PAM sequence: CTC
ggccaggggctgcgcgaaca

SEQ ID NO: 17034 - DNA, 20 bp, Artificial Sequence
  Description of Artificial Sequence: Synthetic oligonucleotide
  Target: ANGPTL4; (+) strand; PAM type: YTN; PAM sequence: CTG
cgcgaacacgcggagcgcac

SEQ ID NO: 17035 - DNA, 20 bp, Artificial Sequence
  Description of Artificial Sequence: Synthetic oligonucleotide
  Target: ANGPTL4; (+) strand; PAM type: YTN; PAM sequence: CTG
agcgcgctggagcggcgcct

SEQ ID NO: 17036 - DNA, 20 bp, Artificial Sequence
  Description of Artificial Sequence: Synthetic oligonucleotide
  Target: ANGPTL4; (+) strand; PAM type: YTN; PAM sequence: CTG
gagcggcgcctgagcgcgtg

SEQ ID NO: 17037 - DNA, 20 bp, Artificial Sequence
  Description of Artificial Sequence: Synthetic oligonucleotide
  Target: ANGPTL4; (+) strand; PAM type: YTN; PAM sequence: CTG
agcgcgtgcgggtccgcctg

SEQ ID NO: 17038 - DNA, 20 bp, Artificial Sequence
  Description of Artificial Sequence: Synthetic oligonucleotide
  Target: ANGPTL4; (+) strand; PAM type: YTN; PAM sequence: CTG
tcagggaaccgaggggtcca

SEQ ID NO: 17039 - DNA, 20 bp, Artificial Sequence
  Description of Artificial Sequence: Synthetic oligonucleotide
  Target: ANGPTL4; (+) strand; PAM type: YTN; PAM sequence: CTC
ccgttagcccctgagagccg

SEQ ID NO: 17040 - DNA, 20 bp, Artificial Sequence
  Description of Artificial Sequence: Synthetic oligonucleotide
  Target: ANGPTL4; (+) strand; PAM type: YTN; PAM sequence: TTA
gcccctgagagccgggtgga

SEQ ID NO: 17041 - DNA, 20 bp, Artificial Sequence
  Description of Artificial Sequence: Synthetic oligonucleotide
  Target: ANGPTL4; (+) strand; PAM type: YTN; PAM sequence: CTG
agagccgggtggaccctgag

SEQ ID NO: 17042 - DNA, 20 bp, Artificial Sequence
  Description of Artificial Sequence: Synthetic oligonucleotide
  Target: ANGPTL4; (+) strand; PAM type: YTN; PAM sequence: CTG
aggtccttcacagcctgcag

SEQ ID NO: 17043 - DNA, 20 bp, Artificial Sequence
  Description of Artificial Sequence: Synthetic oligonucleotide
  Target: ANGPTL4; (+) strand; PAM type: YTN; PAM sequence: CTT
cacagcctgcaggtacgtgt

SEQ ID NO: 17044 - DNA, 20 bp, Artificial Sequence
  Description of Artificial Sequence: Synthetic oligonucleotide
  Target: ANGPTL4; (+) strand; PAM type: YTN; PAM sequence: TTC
acagcctgcaggtacgtgtc

SEQ ID NO: 17045 - DNA, 20 bp, Artificial Sequence
  Description of Artificial Sequence: Synthetic oligonucleotide
  Target: ANGPTL4; (+) strand; PAM type: YTN; PAM sequence: CTG
caggtacgtgtccccagggc

SEQ ID NO: 17046 - DNA, 20 bp, Artificial Sequence
  Description of Artificial Sequence: Synthetic oligonucleotide
  Target: ANGPTL4; (+) strand; PAM type: YTN; PAM sequence: CTG
gttctccgcgcccctagtgg

SEQ ID NO: 17047 - DNA, 20 bp, Artificial Sequence
  Description of Artificial Sequence: Synthetic oligonucleotide
  Target: ANGPTL4; (+) strand; PAM type: YTN; PAM sequence: TTC
tccgcgcccctagtggctct

SEQ ID NO: 17048 - DNA, 20 bp, Artificial Sequence
  Description of Artificial Sequence: Synthetic oligonucleotide
  Target: ANGPTL4; (+) strand; PAM type: YTN; PAM sequence: CTC
cgcgcccctagtggctctcc

SEQ ID NO: 17049 - DNA, 20 bp, Artificial Sequence
  Description of Artificial Sequence: Synthetic oligonucleotide
  Target: ANGPTL4; (+) strand; PAM type: YTN; PAM sequence: CTA
gtggctctcctggcttggaa

SEQ ID NO: 17050 - DNA, 20 bp, Artificial Sequence
  Description of Artificial Sequence: Synthetic oligonucleotide
  Target: ANGPTL4; (+) strand; PAM type: YTN; PAM sequence: CTC
tcctggcttggaagggtatg

SEQ ID NO: 17051 - DNA, 20 bp, Artificial Sequence
  Description of Artificial Sequence: Synthetic oligonucleotide
  Target: ANGPTL4; (+) strand; PAM type: YTN; PAM sequence: CTC
ctggcttggaagggtatgga

SEQ ID NO: 17052 - DNA, 20 bp, Artificial Sequence
  Description of Artificial Sequence: Synthetic oligonucleotide
  Target: ANGPTL4; (+) strand; PAM type: YTN; PAM sequence: CTG
gcttggaagggtatggacag

SEQ ID NO: 17053 - DNA, 20 bp, Artificial Sequence
  Description of Artificial Sequence: Synthetic oligonucleotide
  Target: ANGPTL4; (+) strand; PAM type: YTN; PAM sequence: CTT
ggaagggtatggacaggagt

SEQ ID NO: 17054 - DNA, 20 bp, Artificial Sequence
  Description of Artificial Sequence: Synthetic oligonucleotide
  Target: ANGPTL4; (+) strand; PAM type: YTN; PAM sequence: TTG
gaagggtatggacaggagtg

SEQ ID NO: 17055 - DNA, 20 bp, Artificial Sequence
  Description of Artificial Sequence: Synthetic oligonucleotide
  Target: ANGPTL4; (+) strand; PAM type: YTN; PAM sequence: CTG
tggctccctgggcttccctg

SEQ ID NO: 17056 - DNA, 20 bp, Artificial Sequence
  Description of Artificial Sequence: Synthetic oligonucleotide
  Target: ANGPTL4; (+) strand; PAM type: YTN; PAM sequence: CTC
cctgggcttccctgcgtcaa

SEQ ID NO: 17057 - DNA, 20 bp, Artificial Sequence
  Description of Artificial Sequence: Synthetic oligonucleotide
  Target: ANGPTL4; (+) strand; PAM type: YTN; PAM sequence: CTG
ggcttccctgcgtcaaggga

SEQ ID NO: 17058 - DNA, 20 bp, Artificial Sequence
  Description of Artificial Sequence: Synthetic oligonucleotide
  Target: ANGPTL4; (+) strand; PAM type: YTN; PAM sequence: CTT
ccctgcgtcaagggatgggc

SEQ ID NO: 17059 - DNA, 20 bp, Artificial Sequence
  Description of Artificial Sequence: Synthetic oligonucleotide
  Target: ANGPTL4; (+) strand; PAM type: YTN; PAM sequence: TTC
cctgcgtcaagggatgggct

SEQ ID NO: 17060 - DNA, 20 bp, Artificial Sequence
  Description of Artificial Sequence: Synthetic oligonucleotide
  Target: ANGPTL4; (+) strand; PAM type: YTN; PAM sequence: CTG
cgtcaagggatgggctcccc

SEQ ID NO: 17061 - DNA, 20 bp, Artificial Sequence
  Description of Artificial Sequence: Synthetic oligonucleotide
  Target: ANGPTL4; (+) strand; PAM type: YTN; PAM sequence: CTC
cccccttaggaagccgagga

SEQ ID NO: 17062 - DNA, 20 bp, Artificial Sequence
  Description of Artificial Sequence: Synthetic oligonucleotide
  Target: ANGPTL4; (+) strand; PAM type: YTN; PAM sequence: CTT
aggaagccgaggagggaggt

SEQ ID NO: 17063 - DNA, 20 bp, Artificial Sequence
  Description of Artificial Sequence: Synthetic oligonucleotide
  Target: ANGPTL4; (+) strand; PAM type: YTN; PAM sequence: TTA
ggaagccgaggagggaggtt

SEQ ID NO: 17064 - DNA, 20 bp, Artificial Sequence
  Description of Artificial Sequence: Synthetic oligonucleotide
  Target: ANGPTL4; (+) strand; PAM type: YTN; PAM sequence: TTC
gctcaaggccaggaattcaa

SEQ ID NO: 17065 - DNA, 20 bp, Artificial Sequence
  Description of Artificial Sequence: Synthetic oligonucleotide
  Target: ANGPTL4; (+) strand; PAM type: YTN; PAM sequence: CTC
aaggccaggaattcaagacc

SEQ ID NO: 17066 - DNA, 20 bp, Artificial Sequence
  Description of Artificial Sequence: Synthetic oligonucleotide
  Target: ANGPTL4; (+) strand; PAM type: YTN; PAM sequence: TTC
aagaccacctaaagcaaaat

SEQ ID NO: 17067 - DNA, 20 bp, Artificial Sequence
  Description of Artificial Sequence: Synthetic oligonucleotide
  Target: ANGPTL4; (+) strand; PAM type: YTN; PAM sequence: CTA
aagcaaaatagcgagacccc

SEQ ID NO: 17068 - DNA, 20 bp, Artificial Sequence
  Description of Artificial Sequence: Synthetic oligonucleotide
  Target: ANGPTL4; (+) strand; PAM type: YTN; PAM sequence: CTC
ttctacacacacacacacac

SEQ ID NO: 17069 - DNA, 20 bp, Artificial Sequence
  Description of Artificial Sequence: Synthetic oligonucleotide
  Target: ANGPTL4; (+) strand; PAM type: YTN; PAM sequence: CTT
ctacacacacacacacacac

SEQ ID NO: 17070 - DNA, 20 bp, Artificial Sequence
  Description of Artificial Sequence: Synthetic oligonucleotide
  Target: ANGPTL4; (+) strand; PAM type: YTN; PAM sequence: TTC
tacacacacacacacacaca

SEQ ID NO: 17071 - DNA, 20 bp, Artificial Sequence
  Description of Artificial Sequence: Synthetic oligonucleotide
  Target: ANGPTL4; (+) strand; PAM type: YTN; PAM sequence: CTA
cacacacacacacacacaca

SEQ ID NO: 17072 - DNA, 20 bp, Artificial Sequence
  Description of Artificial Sequence: Synthetic oligonucleotide
  Target: ANGPTL4; (+) strand; PAM type: YTN; PAM sequence: TTA
aaaaacgaccgggcgcagtg

SEQ ID NO: 17073 - DNA, 20 bp, Artificial Sequence
  Description of Artificial Sequence: Synthetic oligonucleotide
  Target: ANGPTL4; (+) strand; PAM type: YTN; PAM sequence: CTC
acggagcctccacctgctgt

SEQ ID NO: 17074 - DNA, 20 bp, Artificial Sequence
  Description of Artificial Sequence: Synthetic oligonucleotide
  Target: ANGPTL4; (+) strand; PAM type: YTN; PAM sequence: CTC
cacctgctgtcgagactagc

SEQ ID NO: 17075 - DNA, 20 bp, Artificial Sequence
  Description of Artificial Sequence: Synthetic oligonucleotide
  Target: ANGPTL4; (+) strand; PAM type: YTN; PAM sequence: CTG
ctgtcgagactagcctggcc

SEQ ID NO: 17076 - DNA, 20 bp, Artificial Sequence
  Description of Artificial Sequence: Synthetic oligonucleotide
  Target: ANGPTL4; (+) strand; PAM type: YTN; PAM sequence: CTG
tcgagactagcctggccaac

SEQ ID NO: 17077 - DNA, 20 bp, Artificial Sequence
  Description of Artificial Sequence: Synthetic oligonucleotide
  Target: ANGPTL4; (+) strand; PAM type: YTN; PAM sequence: CTA
gcctggccaacatggagaaa

SEQ ID NO: 17078 - DNA, 20 bp, Artificial Sequence
  Description of Artificial Sequence: Synthetic oligonucleotide
  Target: ANGPTL4; (+) strand; PAM type: YTN; PAM sequence: CTG
gccaacatggagaaacctcg

SEQ ID NO: 17079 - DNA, 20 bp, Artificial Sequence
  Description of Artificial Sequence: Synthetic oligonucleotide
  Target: ANGPTL4; (+) strand; PAM type: YTN; PAM sequence: CTC
gtctctactaaaaatacaaa

SEQ ID NO: 17080 - DNA, 20 bp, Artificial Sequence
  Description of Artificial Sequence: Synthetic oligonucleotide
  Target: ANGPTL4; (+) strand; PAM type: YTN; PAM sequence: CTC
tactaaaaatacaaaaaatt

SEQ ID NO: 17081 - DNA, 20 bp, Artificial Sequence
  Description of Artificial Sequence: Synthetic oligonucleotide
  Target: ANGPTL4; (+) strand; PAM type: YTN; PAM sequence: CTA
ctaaaaatacaaaaaattag

SEQ ID NO: 17082 - DNA, 20 bp, Artificial Sequence
  Description of Artificial Sequence: Synthetic oligonucleotide
  Target: ANGPTL4; (+) strand; PAM type: YTN; PAM sequence: CTA
aaaatacaaaaaattagcct

SEQ ID NO: 17083 - DNA, 20 bp, Artificial Sequence
  Description of Artificial Sequence: Synthetic oligonucleotide
  Target: ANGPTL4; (+) strand; PAM type: YTN; PAM sequence: TTA
gcctggcatggtgtgcatgc

SEQ ID NO: 17084 - DNA, 20 bp, Artificial Sequence
  Description of Artificial Sequence: Synthetic oligonucleotide
  Target: ANGPTL4; (+) strand; PAM type: YTN; PAM sequence: CTG
gcatggtgtgcatgcctgta

SEQ ID NO: 17085 - DNA, 20 bp, Artificial Sequence
  Description of Artificial Sequence: Synthetic oligonucleotide
  Target: ANGPTL4; (+) strand; PAM type: YTN; PAM sequence: CTG
taatcccagctacttgggag

SEQ ID NO: 17086 - DNA, 20 bp, Artificial Sequence
  Description of Artificial Sequence: Synthetic oligonucleotide
  Target: ANGPTL4; (+) strand; PAM type: YTN; PAM sequence: CTA
cttgggaggctgaggcagga

SEQ ID NO: 17087 - DNA, 20 bp, Artificial Sequence
  Description of Artificial Sequence: Synthetic oligonucleotide
  Target: ANGPTL4; (+) strand; PAM type: YTN; PAM sequence: CTT
gggaggctgaggcaggagaa

SEQ ID NO: 17088 - DNA, 20 bp, Artificial Sequence
  Description of Artificial Sequence: Synthetic oligonucleotide
  Target: ANGPTL4; (+) strand; PAM type: YTN; PAM sequence: TTG
ggaggctgaggcaggagaat

SEQ ID NO: 17089 - DNA, 20 bp, Artificial Sequence
  Description of Artificial Sequence: Synthetic oligonucleotide
  Target: ANGPTL4; (+) strand; PAM type: YTN; PAM sequence: CTG
aggcaggagaatctcttgaa

SEQ ID NO: 17090 - DNA, 20 bp, Artificial Sequence
  Description of Artificial Sequence: Synthetic oligonucleotide
  Target: ANGPTL4; (+) strand; PAM type: YTN; PAM sequence: CTC
ttgaacccgggaggcagagg

SEQ ID NO: 17091 - DNA, 20 bp, Artificial Sequence
  Description of Artificial Sequence: Synthetic oligonucleotide
  Target: ANGPTL4; (+) strand; PAM type: YTN; PAM sequence: CTT
gaacccgggaggcagaggtt

SEQ ID NO: 17092 - DNA, 20 bp, Artificial Sequence
  Description of Artificial Sequence: Synthetic oligonucleotide
  Target: ANGPTL4; (+) strand; PAM type: YTN; PAM sequence: TTG
aacccgggaggcagaggttg

SEQ ID NO: 17093 - DNA, 20 bp, Artificial Sequence
  Description of Artificial Sequence: Synthetic oligonucleotide
  Target: ANGPTL4; (+) strand; PAM type: YTN; PAM sequence: TTG
cagtgagccgagatcgcagc

SEQ ID NO: 17094 - DNA, 20 bp, Artificial Sequence
  Description of Artificial Sequence: Synthetic oligonucleotide
  Target: ANGPTL4; (+) strand; PAM type: YTN; PAM sequence: CTG
cactccagcctgggcaacag

SEQ ID NO: 17095 - DNA, 20 bp, Artificial Sequence
  Description of Artificial Sequence: Synthetic oligonucleotide
  Target: ANGPTL4; (+) strand; PAM type: YTN; PAM sequence: CTC
cagcctgggcaacagagtga

SEQ ID NO: 17096 - DNA, 20 bp, Artificial Sequence
  Description of Artificial Sequence: Synthetic oligonucleotide
  Target: ANGPTL4; (+) strand; PAM type: YTN; PAM sequence: CTG
ggcaacagagtgagactcct

SEQ ID NO: 17097 - DNA, 20 bp, Artificial Sequence
  Description of Artificial Sequence: Synthetic oligonucleotide
  Target: ANGPTL4; (+) strand; PAM type: YTN; PAM sequence: CTC
ctcaaaaaaataatagcgat

SEQ ID NO: 17098 - DNA, 20 bp, Artificial Sequence
  Description of Artificial Sequence: Synthetic oligonucleotide
  Target: ANGPTL4; (+) strand; PAM type: YTN; PAM sequence: CTC
aaaaaaataatagcgataaa

SEQ ID NO: 17099 - DNA, 20 bp, Artificial Sequence
  Description of Artificial Sequence: Synthetic oligonucleotide
  Target: ANGPTL4; (+) strand; PAM type: YTN; PAM sequence: CTC
acgcttgtagtcccagcact

SEQ ID NO: 17100 - DNA, 20 bp, Artificial Sequence
  Description of Artificial Sequence: Synthetic oligonucleotide
  Target: ANGPTL4; (+) strand; PAM type: YTN; PAM sequence: CTT
gtagtcccagcactttggga

SEQ ID NO: 17101 - DNA, 20 bp, Artificial Sequence
  Description of Artificial Sequence: Synthetic oligonucleotide
  Target: ANGPTL4; (+) strand; PAM type: YTN; PAM sequence: TTG
tagtcccagcactttgggag

SEQ ID NO: 17102 - DNA, 20 bp, Artificial Sequence
  Description of Artificial Sequence: Synthetic oligonucleotide
  Target: ANGPTL4; (+) strand; PAM type: YTN; PAM sequence: CTT
tgggagggcgaggccagtgg

SEQ ID NO: 17103 - DNA, 20 bp, Artificial Sequence
  Description of Artificial Sequence: Synthetic oligonucleotide
  Target: ANGPTL4; (+) strand; PAM type: YTN; PAM sequence: TTT
gggagggcgaggccagtgga

SEQ ID NO: 17104 - DNA, 20 bp, Artificial Sequence
  Description of Artificial Sequence: Synthetic oligonucleotide
  Target: ANGPTL4; (+) strand; PAM type: YTN; PAM sequence: TTG
ggagggcgaggccagtggat

SEQ ID NO: 17105 - DNA, 20 bp, Artificial Sequence
  Description of Artificial Sequence: Synthetic oligonucleotide
  Target: ANGPTL4; (+) strand; PAM type: YTN; PAM sequence: CTG
aggtcaggagttcaagacca

SEQ ID NO: 17106 - DNA, 20 bp, Artificial Sequence
  Description of Artificial Sequence: Synthetic oligonucleotide
  Target: ANGPTL4; (+) strand; PAM type: YTN; PAM sequence: TTC
aagaccagcctgaccaacac

SEQ ID NO: 17107 - DNA, 20 bp, Artificial Sequence
  Description of Artificial Sequence: Synthetic oligonucleotide
  Target: ANGPTL4; (+) strand; PAM type: YTN; PAM sequence: CTG
accaacacagtgaaaccccg

SEQ ID NO: 17108 - DNA, 20 bp, Artificial Sequence
  Description of Artificial Sequence: Synthetic oligonucleotide
  Target: ANGPTL4; (+) strand; PAM type: YTN; PAM sequence: CTC
tactaaaaatacaaaaatta

SEQ ID NO: 17109 - DNA, 20 bp, Artificial Sequence
  Description of Artificial Sequence: Synthetic oligonucleotide
  Target: ANGPTL4; (+) strand; PAM type: YTN; PAM sequence: CTA
ctaaaaatacaaaaattagc

SEQ ID NO: 17110 - DNA, 20 bp, Artificial Sequence
  Description of Artificial Sequence: Synthetic oligonucleotide
  Target: ANGPTL4; (+) strand; PAM type: YTN; PAM sequence: CTA
aaaatacaaaaattagctgg

SEQ ID NO: 17111 - DNA, 20 bp, Artificial Sequence
  Description of Artificial Sequence: Synthetic oligonucleotide
  Target: ANGPTL4; (+) strand; PAM type: YTN; PAM sequence: TTA
gctgggtgtggtggtgggcg

SEQ ID NO: 17112 - DNA, 20 bp, Artificial Sequence
  Description of Artificial Sequence: Synthetic oligonucleotide
  Target: ANGPTL4; (+) strand; PAM type: YTN; PAM sequence: CTG
ggtgtggtggtgggcgcctg

SEQ ID NO: 17113 - DNA, 20 bp, Artificial Sequence
  Description of Artificial Sequence: Synthetic oligonucleotide
  Target: ANGPTL4; (+) strand; PAM type: YTN; PAM sequence: CTG
taatcccagctactggggag

SEQ ID NO: 17114 - DNA, 20 bp, Artificial Sequence
  Description of Artificial Sequence: Synthetic oligonucleotide
  Target: ANGPTL4; (+) strand; PAM type: YTN; PAM sequence: CTA
ctggggaggctgaggcagga

SEQ ID NO: 17115 - DNA, 20 bp, Artificial Sequence
  Description of Artificial Sequence: Synthetic oligonucleotide
  Target: ANGPTL4; (+) strand; PAM type: YTN; PAM sequence: CTG
gggaggctgaggcaggagaa

SEQ ID NO: 17116 - DNA, 20 bp, Artificial Sequence
  Description of Artificial Sequence: Synthetic oligonucleotide
  Target: ANGPTL4; (+) strand; PAM type: YTN; PAM sequence: CTG
aggcaggagaacctcttgaa

SEQ ID NO: 17117 - DNA, 20 bp, Artificial Sequence
  Description of Artificial Sequence: Synthetic oligonucleotide
  Target: ANGPTL4; (+) strand; PAM type: YTN; PAM sequence: CTC
ttgaacccgggaggcggagg

SEQ ID NO: 17118 - DNA, 20 bp, Artificial Sequence
  Description of Artificial Sequence: Synthetic oligonucleotide
  Target: ANGPTL4; (+) strand; PAM type: YTN; PAM sequence: CTT
gaacccgggaggcggaggtt

SEQ ID NO: 17119 - DNA, 20 bp, Artificial Sequence
  Description of Artificial Sequence: Synthetic oligonucleotide
  Target: ANGPTL4; (+) strand; PAM type: YTN; PAM sequence: TTG
aacccgggaggcggaggttg

SEQ ID NO: 17120 - DNA, 20 bp, Artificial Sequence
  Description of Artificial Sequence: Synthetic oligonucleotide
  Target: ANGPTL4; (+) strand; PAM type: YTN; PAM sequence: TTG
cagtgagccgggatcatgcc

SEQ ID NO: 17121 - DNA, 20 bp, Artificial Sequence
  Description of Artificial Sequence: Synthetic oligonucleotide
  Target: ANGPTL4; (+) strand; PAM type: YTN; PAM sequence: TTG
cactccagcctgggcgacag

SEQ ID NO: 17122 - DNA, 20 bp, Artificial Sequence
  Description of Artificial Sequence: Synthetic oligonucleotide
  Target: ANGPTL4; (+) strand; PAM type: YTN; PAM sequence: CTC
cagcctgggcgacagagctc

SEQ ID NO: 17123 - DNA, 20 bp, Artificial Sequence
  Description of Artificial Sequence: Synthetic oligonucleotide
  Target: ANGPTL4; (+) strand; PAM type: YTN; PAM sequence: CTG
ggcgacagagctcgactcca

SEQ ID NO: 17124 - DNA, 20 bp, Artificial Sequence
  Description of Artificial Sequence: Synthetic oligonucleotide
  Target: ANGPTL4; (+) strand; PAM type: YTN; PAM sequence: CTC
gactccatctcaaaataata

SEQ ID NO: 17125 - DNA, 20 bp, Artificial Sequence
  Description of Artificial Sequence: Synthetic oligonucleotide
  Target: ANGPTL4; (+) strand; PAM type: YTN; PAM sequence: CTC
catctcaaaataataataat

SEQ ID NO: 17126 - DNA, 20 bp, Artificial Sequence
  Description of Artificial Sequence: Synthetic oligonucleotide
  Target: ANGPTL4; (+) strand; PAM type: YTN; PAM sequence: CTC
aaaataataataataataaa

SEQ ID NO: 17127 - DNA, 20 bp, Artificial Sequence
  Description of Artificial Sequence: Synthetic oligonucleotide
  Target: ANGPTL4; (+) strand; PAM type: YTN; PAM sequence: TTA
gccaggtgtggtggcagcta

SEQ ID NO: 17128 - DNA, 20 bp, Artificial Sequence
  Description of Artificial Sequence: Synthetic oligonucleotide
  Target: ANGPTL4; (+) strand; PAM type: YTN; PAM sequence: CTA
cttgggaggctgagacacaa

SEQ ID NO: 17129 - DNA, 20 bp, Artificial Sequence
  Description of Artificial Sequence: Synthetic oligonucleotide
  Target: ANGPTL4; (+) strand; PAM type: YTN; PAM sequence: CTT
gggaggctgagacacaagaa

SEQ ID NO: 17130 - DNA, 20 bp, Artificial Sequence
  Description of Artificial Sequence: Synthetic oligonucleotide
  Target: ANGPTL4; (+) strand; PAM type: YTN; PAM sequence: TTG
ggaggctgagacacaagaat

SEQ ID NO: 17131 - DNA, 20 bp, Artificial Sequence
  Description of Artificial Sequence: Synthetic oligonucleotide
  Target: ANGPTL4; (+) strand; PAM type: YTN; PAM sequence: CTG
agacacaagaatcacttgag

SEQ ID NO: 17132 - DNA, 20 bp, Artificial Sequence
  Description of Artificial Sequence: Synthetic oligonucleotide
  Target: ANGPTL4; (+) strand; PAM type: YTN; PAM sequence: CTT
gagtctgggaggcagaggtt

SEQ ID NO: 17133 - DNA, 20 bp, Artificial Sequence
  Description of Artificial Sequence: Synthetic oligonucleotide
  Target: ANGPTL4; (+) strand; PAM type: YTN; PAM sequence: TTG
agtctgggaggcagaggttg

SEQ ID NO: 17134 - DNA, 20 bp, Artificial Sequence
  Description of Artificial Sequence: Synthetic oligonucleotide
  Target: ANGPTL4; (+) strand; PAM type: YTN; PAM sequence: CTG
ggaggcagaggttgcagtga

SEQ ID NO: 17135 - DNA, 20 bp, Artificial Sequence
  Description of Artificial Sequence: Synthetic oligonucleotide
  Target: ANGPTL4; (+) strand; PAM type: YTN; PAM sequence: TTG
cagtgagccaagattgcgcc

SEQ ID NO: 17136 - DNA, 20 bp, Artificial Sequence
  Description of Artificial Sequence: Synthetic oligonucleotide
  Target: ANGPTL4; (+) strand; PAM type: YTN; PAM sequence: TTG
cgccactgcactccaacctg

SEQ ID NO: 17137 - DNA, 20 bp, Artificial Sequence
  Description of Artificial Sequence: Synthetic oligonucleotide
  Target: ANGPTL4; (+) strand; PAM type: YTN; PAM sequence: CTG
cactccaacctgggtgacag

SEQ ID NO: 17138 - DNA, 20 bp, Artificial Sequence
  Description of Artificial Sequence: Synthetic oligonucleotide
  Target: ANGPTL4; (+) strand; PAM type: YTN; PAM sequence: CTC
caacctgggtgacagagcga

SEQ ID NO: 17139 - DNA, 20 bp, Artificial Sequence
  Description of Artificial Sequence: Synthetic oligonucleotide
  Target: ANGPTL4; (+) strand; PAM type: YTN; PAM sequence: CTG
ggtgacagagcgagactctg

SEQ ID NO: 17140 - DNA, 20 bp, Artificial Sequence
  Description of Artificial Sequence: Synthetic oligonucleotide
  Target: ANGPTL4; (+) strand; PAM type: YTN; PAM sequence: CTC
tgtctgaaaaaataaaaaat

SEQ ID NO: 17141 - DNA, 20 bp, Artificial Sequence
  Description of Artificial Sequence: Synthetic oligonucleotide
  Target: ANGPTL4; (+) strand; PAM type: YTN; PAM sequence: CTG
tctgaaaaaataaaaaataa

SEQ ID NO: 17142 - DNA, 20 bp, Artificial Sequence
  Description of Artificial Sequence: Synthetic oligonucleotide
  Target: ANGPTL4; (+) strand; PAM type: YTN; PAM sequence: CTG
aaaaaataaaaaataagcca

SEQ ID NO: 17143 - DNA, 20 bp, Artificial Sequence
  Description of Artificial Sequence: Synthetic oligonucleotide
  Target: ANGPTL4; (+) strand; PAM type: YTN; PAM sequence: CTG
catgactgtagtcccagcta

SEQ ID NO: 17144 - DNA, 20 bp, Artificial Sequence
  Description of Artificial Sequence: Synthetic oligonucleotide
  Target: ANGPTL4; (+) strand; PAM type: YTN; PAM sequence: CTG
tagtcccagctacacaggag

SEQ ID NO: 17145 - DNA, 20 bp, Artificial Sequence
  Description of Artificial Sequence: Synthetic oligonucleotide
  Target: ANGPTL4; (+) strand; PAM type: YTN; PAM sequence: CTA
cacaggaggctgaaaacagg

SEQ ID NO: 17146 - DNA, 20 bp, Artificial Sequence
  Description of Artificial Sequence: Synthetic oligonucleotide
  Target: ANGPTL4; (+) strand; PAM type: YTN; PAM sequence: CTG
aaaacaggaggatcgcctga

SEQ ID NO: 17147 - DNA, 20 bp, Artificial Sequence
  Description of Artificial Sequence: Synthetic oligonucleotide
  Target: ANGPTL4; (+) strand; PAM type: YTN; PAM sequence: CTG
accccaggagttggaggctg

SEQ ID NO: 17148 - DNA, 20 bp, Artificial Sequence
  Description of Artificial Sequence: Synthetic oligonucleotide
  Target: ANGPTL4; (+) strand; PAM type: YTN; PAM sequence: TTG
gaggctgcagtgagctgtga

SEQ ID NO: 17149 - DNA, 20 bp, Artificial Sequence
  Description of Artificial Sequence: Synthetic oligonucleotide
  Target: ANGPTL4; (+) strand; PAM type: YTN; PAM sequence: CTG
cagtgagctgtgacagcacc

SEQ ID NO: 17150 - DNA, 20 bp, Artificial Sequence
  Description of Artificial Sequence: Synthetic oligonucleotide
  Target: ANGPTL4; (+) strand; PAM type: YTN; PAM sequence: CTG
tgacagcaccactgcactcc

SEQ ID NO: 17151 - DNA, 20 bp, Artificial Sequence
  Description of Artificial Sequence: Synthetic oligonucleotide
  Target: ANGPTL4; (+) strand; PAM type: YTN; PAM sequence: CTG
cactccagcctgggcgagag

SEQ ID NO: 17152 - DNA, 20 bp, Artificial Sequence
  Description of Artificial Sequence: Synthetic oligonucleotide
  Target: ANGPTL4; (+) strand; PAM type: YTN; PAM sequence: CTC
cagcctgggcgagagaacga

SEQ ID NO: 17153 - DNA, 20 bp, Artificial Sequence
  Description of Artificial Sequence: Synthetic oligonucleotide
  Target: ANGPTL4; (+) strand; PAM type: YTN; PAM sequence: CTG
ggcgagagaacgagaccccg

SEQ ID NO: 17154 - DNA, 20 bp, Artificial Sequence
  Description of Artificial Sequence: Synthetic oligonucleotide
  Target: ANGPTL4; (+) strand; PAM type: YTN; PAM sequence: TTG
ggaaaaaaaagaaaaaagaa

SEQ ID NO: 17155 - DNA, 20 bp, Artificial Sequence
  Description of Artificial Sequence: Synthetic oligonucleotide
  Target: ANGPTL4; (+) strand; PAM type: YTN; PAM sequence: CTC
ccttgcctggcctcagcgga

SEQ ID NO: 17156 - DNA, 20 bp, Artificial Sequence
  Description of Artificial Sequence: Synthetic oligonucleotide
  Target: ANGPTL4; (+) strand; PAM type: YTN; PAM sequence: CTT
gcctggcctcagcggatgga

SEQ ID NO: 17157 - DNA, 20 bp, Artificial Sequence
  Description of Artificial Sequence: Synthetic oligonucleotide
  Target: ANGPTL4; (+) strand; PAM type: YTN; PAM sequence: TTG
cctggcctcagcggatggag

SEQ ID NO: 17158 - DNA, 20 bp, Artificial Sequence
  Description of Artificial Sequence: Synthetic oligonucleotide
  Target: ANGPTL4; (+) strand; PAM type: YTN; PAM sequence: CTG
gcctcagcggatggagattt

SEQ ID NO: 17159 - DNA, 20 bp, Artificial Sequence
  Description of Artificial Sequence: Synthetic oligonucleotide
  Target: ANGPTL4; (+) strand; PAM type: YTN; PAM sequence: CTC
agcggatggagatttggaag

SEQ ID NO: 17160 - DNA, 20 bp, Artificial Sequence
  Description of Artificial Sequence: Synthetic oligonucleotide
  Target: ANGPTL4; (+) strand; PAM type: YTN; PAM sequence: TTT
ggaaggatggatgagtggat

SEQ ID NO: 17161 - DNA, 20 bp, Artificial Sequence
  Description of Artificial Sequence: Synthetic oligonucleotide
  Target: ANGPTL4; (+) strand; PAM type: YTN; PAM sequence: TTG
gaaggatggatgagtggatg

SEQ ID NO: 17162 - DNA, 20 bp, Artificial Sequence
  Description of Artificial Sequence: Synthetic oligonucleotide
  Target: ANGPTL4; (+) strand; PAM type: YTN; PAM sequence: TTA
agaggttggggtaggcaagc

SEQ ID NO: 17163 - DNA, 20 bp, Artificial Sequence
  Description of Artificial Sequence: Synthetic oligonucleotide
  Target: ANGPTL4; (+) strand; PAM type: YTN; PAM sequence: TTG
gggtaggcaagctgggtcct

SEQ ID NO: 17164 - DNA, 20 bp, Artificial Sequence
  Description of Artificial Sequence: Synthetic oligonucleotide
  Target: ANGPTL4; (+) strand; PAM type: YTN; PAM sequence: CTG
ggtcctcaccaaggttttca

SEQ ID NO: 17165 - DNA, 20 bp, Artificial Sequence
  Description of Artificial Sequence: Synthetic oligonucleotide
  Target: ANGPTL4; (+) strand; PAM type: YTN; PAM sequence: CTC
accaaggttttcacccctcc

SEQ ID NO: 17166 - DNA, 20 bp, Artificial Sequence
  Description of Artificial Sequence: Synthetic oligonucleotide
  Target: ANGPTL4; (+) strand; PAM type: YTN; PAM sequence: TTT
tcacccctccccagacacaa

SEQ ID NO: 17167 - DNA, 20 bp, Artificial Sequence
  Description of Artificial Sequence: Synthetic oligonucleotide
  Target: ANGPTL4; (+) strand; PAM type: YTN; PAM sequence: TTT
cacccctccccagacacaac

SEQ ID NO: 17168 - DNA, 20 bp, Artificial Sequence
  Description of Artificial Sequence: Synthetic oligonucleotide
  Target: ANGPTL4; (+) strand; PAM type: YTN; PAM sequence: TTC
acccctccccagacacaact

SEQ ID NO: 17169 - DNA, 20 bp, Artificial Sequence
  Description of Artificial Sequence: Synthetic oligonucleotide
  Target: ANGPTL4; (+) strand; PAM type: YTN; PAM sequence: CTC
cccagacacaactcaaggct

SEQ ID NO: 17170 - DNA, 20 bp, Artificial Sequence
  Description of Artificial Sequence: Synthetic oligonucleotide
  Target: ANGPTL4; (+) strand; PAM type: YTN; PAM sequence: CTC
aaggctcagaacagcaggat

SEQ ID NO: 17171 - DNA, 20 bp, Artificial Sequence
  Description of Artificial Sequence: Synthetic oligonucleotide
  Target: ANGPTL4; (+) strand; PAM type: YTN; PAM sequence: CTC
agaacagcaggatccagcaa

SEQ ID NO: 17172 - DNA, 20 bp, Artificial Sequence
  Description of Artificial Sequence: Synthetic oligonucleotide
  Target: ANGPTL4; (+) strand; PAM type: YTN; PAM sequence: CTC
ttccacaaggtggcccagca

SEQ ID NO: 17173 - DNA, 20 bp, Artificial Sequence
  Description of Artificial Sequence: Synthetic oligonucleotide
  Target: ANGPTL4; (+) strand; PAM type: YTN; PAM sequence: CTT
ccacaaggtggcccagcagc

SEQ ID NO: 17174 - DNA, 20 bp, Artificial Sequence
  Description of Artificial Sequence: Synthetic oligonucleotide
  Target: ANGPTL4; (+) strand; PAM type: YTN; PAM sequence: TTC
cacaaggtggcccagcagca

SEQ ID NO: 17175 - DNA, 20 bp, Artificial Sequence
  Description of Artificial Sequence: Synthetic oligonucleotide
  Target: ANGPTL4; (+) strand; PAM type: YTN; PAM sequence: CTG
gagaagcagcacctgcgaat

SEQ ID NO: 17176 - DNA, 20 bp, Artificial Sequence
  Description of Artificial Sequence: Synthetic oligonucleotide
  Target: ANGPTL4; (+) strand; PAM type: YTN; PAM sequence: CTG
cgaattcagcatctgcaaag

SEQ ID NO: 17177 - DNA, 20 bp, Artificial Sequence
  Description of Artificial Sequence: Synthetic oligonucleotide
  Target: ANGPTL4; (+) strand; PAM type: YTN; PAM sequence: TTC
agcatctgcaaagccaggta

SEQ ID NO: 17178 - DNA, 20 bp, Artificial Sequence
  Description of Artificial Sequence: Synthetic oligonucleotide
  Target: ANGPTL4; (+) strand; PAM type: YTN; PAM sequence: CTG
caaagccaggtaaccctagg

SEQ ID NO: 17179 - DNA, 20 bp, Artificial Sequence
  Description of Artificial Sequence: Synthetic oligonucleotide
  Target: ANGPTL4; (+) strand; PAM type: YTN; PAM sequence: CTA
ggatcaagggagaaaaggtc

SEQ ID NO: 17180 - DNA, 20 bp, Artificial Sequence
  Description of Artificial Sequence: Synthetic oligonucleotide
  Target: ANGPTL4; (+) strand; PAM type: YTN; PAM sequence: CTC
tgatagctggaccccaggtt

SEQ ID NO: 17181 - DNA, 20 bp, Artificial Sequence
  Description of Artificial Sequence: Synthetic oligonucleotide
  Target: ANGPTL4; (+) strand; PAM type: YTN; PAM sequence: CTG
atagctggaccccaggttga

SEQ ID NO: 17182 - DNA, 20 bp, Artificial Sequence
  Description of Artificial Sequence: Synthetic oligonucleotide
  Target: ANGPTL4; (+) strand; PAM type: YTN; PAM sequence: CTG
gaccccaggttgagagggag

SEQ ID NO: 17183 - DNA, 20 bp, Artificial Sequence
  Description of Artificial Sequence: Synthetic oligonucleotide
  Target: ANGPTL4; (+) strand; PAM type: YTN; PAM sequence: TTG
agagggaggtggtgagaact

SEQ ID NO: 17184 - DNA, 20 bp, Artificial Sequence
  Description of Artificial Sequence: Synthetic oligonucleotide
  Target: ANGPTL4; (+) strand; PAM type: YTN; PAM sequence: CTG
gacgtgtggctggggacgtg

SEQ ID NO: 17185 - DNA, 20 bp, Artificial Sequence
  Description of Artificial Sequence: Synthetic oligonucleotide
  Target: ANGPTL4; (+) strand; PAM type: YTN; PAM sequence: CTG
gggacgtggggccaggcagg

SEQ ID NO: 17186 - DNA, 20 bp, Artificial Sequence
  Description of Artificial Sequence: Synthetic oligonucleotide
  Target: ANGPTL4; (+) strand; PAM type: YTN; PAM sequence: CTG
acaccctcctcccgtcccat

SEQ ID NO: 17187 - DNA, 20 bp, Artificial Sequence
  Description of Artificial Sequence: Synthetic oligonucleotide
  Target: ANGPTL4; (+) strand; PAM type: YTN; PAM sequence: CTC
ctcccgtcccatcctagttt

SEQ ID NO: 17188 - DNA, 20 bp, Artificial Sequence
  Description of Artificial Sequence: Synthetic oligonucleotide
  Target: ANGPTL4; (+) strand; PAM type: YTN; PAM sequence: CTC
ccgtcccatcctagtttggc

SEQ ID NO: 17189 - DNA, 20 bp, Artificial Sequence
  Description of Artificial Sequence: Synthetic oligonucleotide
  Target: ANGPTL4; (+) strand; PAM type: YTN; PAM sequence: CTA
gtttggcctcctggaccaca

SEQ ID NO: 17190 - DNA, 20 bp, Artificial Sequence
  Description of Artificial Sequence: Synthetic oligonucleotide
  Target: ANGPTL4; (+) strand; PAM type: YTN; PAM sequence: TTT
ggcctcctggaccacaagca

SEQ ID NO: 17191 - DNA, 20 bp, Artificial Sequence
  Description of Artificial Sequence: Synthetic oligonucleotide
  Target: ANGPTL4; (+) strand; PAM type: YTN; PAM sequence: TTG
gcctcctggaccacaagcac

SEQ ID NO: 17192 - DNA, 20 bp, Artificial Sequence
  Description of Artificial Sequence: Synthetic oligonucleotide
  Target: ANGPTL4; (+) strand; PAM type: YTN; PAM sequence: CTC
ctggaccacaagcacctaga

SEQ ID NO: 17193 - DNA, 20 bp, Artificial Sequence
  Description of Artificial Sequence: Synthetic oligonucleotide
  Target: ANGPTL4; (+) strand; PAM type: YTN; PAM sequence: CTG
gaccacaagcacctagacca

SEQ ID NO: 17194 - DNA, 20 bp, Artificial Sequence
  Description of Artificial Sequence: Synthetic oligonucleotide
  Target: ANGPTL4; (+) strand; PAM type: YTN; PAM sequence: CTA
gaccatgaggtggccaagcc

SEQ ID NO: 17195 - DNA, 20 bp, Artificial Sequence
  Description of Artificial Sequence: Synthetic oligonucleotide
  Target: ANGPTL4; (+) strand; PAM type: YTN; PAM sequence: CTG
cccgaagaaagaggctgccc

SEQ ID NO: 17196 - DNA, 20 bp, Artificial Sequence
  Description of Artificial Sequence: Synthetic oligonucleotide
  Target: ANGPTL4; (+) strand; PAM type: YTN; PAM sequence: CTG
cccgagatggcccagccagt

SEQ ID NO: 17197 - DNA, 20 bp, Artificial Sequence
  Description of Artificial Sequence: Synthetic oligonucleotide
  Target: ANGPTL4; (+) strand; PAM type: YTN; PAM sequence: TTG
acccggctcacaatgtcagc

SEQ ID NO: 17198 - DNA, 20 bp, Artificial Sequence
  Description of Artificial Sequence: Synthetic oligonucleotide
  Target: ANGPTL4; (+) strand; PAM type: YTN; PAM sequence: CTC
acaatgtcagccgcctgcac

SEQ ID NO: 17199 - DNA, 20 bp, Artificial Sequence
  Description of Artificial Sequence: Synthetic oligonucleotide
  Target: ANGPTL4; (+) strand; PAM type: YTN; PAM sequence: CTG
caccgtgagtgtctgcccct

SEQ ID NO: 17200 - DNA, 20 bp, Artificial Sequence
  Description of Artificial Sequence: Synthetic oligonucleotide
  Target: ANGPTL4; (+) strand; PAM type: YTN; PAM sequence: CTG
cccctcgatgctctccggtg

SEQ ID NO: 17201 - DNA, 20 bp, Artificial Sequence
  Description of Artificial Sequence: Synthetic oligonucleotide
  Target: ANGPTL4; (+) strand; PAM type: YTN; PAM sequence: CTC
gatgctctccggtggccacc

SEQ ID NO: 17202 - DNA, 20 bp, Artificial Sequence
  Description of Artificial Sequence: Synthetic oligonucleotide
  Target: ANGPTL4; (+) strand; PAM type: YTN; PAM sequence: CTC
tccggtggccacccctaccc

SEQ ID NO: 17203 - DNA, 20 bp, Artificial Sequence
  Description of Artificial Sequence: Synthetic oligonucleotide
  Target: ANGPTL4; (+) strand; PAM type: YTN; PAM sequence: CTC
cggtggccacccctaccccg

SEQ ID NO: 17204 - DNA, 20 bp, Artificial Sequence
  Description of Artificial Sequence: Synthetic oligonucleotide
  Target: ANGPTL4; (+) strand; PAM type: YTN; PAM sequence: CTA
ccccgccacttgccattgct

SEQ ID NO: 17205 - DNA, 20 bp, Artificial Sequence
  Description of Artificial Sequence: Synthetic oligonucleotide
  Target: ANGPTL4; (+) strand; PAM type: YTN; PAM sequence: CTT
gccattgctggtcctctcct

SEQ ID NO: 17206 - DNA, 20 bp, Artificial Sequence
  Description of Artificial Sequence: Synthetic oligonucleotide
  Target: ANGPTL4; (+) strand; PAM type: YTN; PAM sequence: TTG
ccattgctggtcctctcctt

SEQ ID NO: 17207 - DNA, 20 bp, Artificial Sequence
  Description of Artificial Sequence: Synthetic oligonucleotide
  Target: ANGPTL4; (+) strand; PAM type: YTN; PAM sequence: TTG
ctggtcctctccttgtcagg

SEQ ID NO: 17208 - DNA, 20 bp, Artificial Sequence
  Description of Artificial Sequence: Synthetic oligonucleotide
  Target: ANGPTL4; (+) strand; PAM type: YTN; PAM sequence: CTG
gtcctctccttgtcaggtcc

SEQ ID NO: 17209 - DNA, 20 bp, Artificial Sequence
  Description of Artificial Sequence: Synthetic oligonucleotide
  Target: ANGPTL4; (+) strand; PAM type: YTN; PAM sequence: CTC
tccttgtcaggtccacctta

SEQ ID NO: 17210 - DNA, 20 bp, Artificial Sequence
  Description of Artificial Sequence: Synthetic oligonucleotide
  Target: ANGPTL4; (+) strand; PAM type: YTN; PAM sequence: CTC
cttgtcaggtccaccttaag

SEQ ID NO: 17211 - DNA, 20 bp, Artificial Sequence
  Description of Artificial Sequence: Synthetic oligonucleotide
  Target: ANGPTL4; (+) strand; PAM type: YTN; PAM sequence: CTT
gtcaggtccaccttaaggag

SEQ ID NO: 17212 - DNA, 20 bp, Artificial Sequence
  Description of Artificial Sequence: Synthetic oligonucleotide
  Target: ANGPTL4; (+) strand; PAM type: YTN; PAM sequence: TTG
tcaggtccaccttaaggaga

SEQ ID NO: 17213 - DNA, 20 bp, Artificial Sequence
  Description of Artificial Sequence: Synthetic oligonucleotide
  Target: ANGPTL4; (+) strand; PAM type: YTN; PAM sequence: CTT
aaggagaagatgtcctggcc

SEQ ID NO: 17214 - DNA, 20 bp, Artificial Sequence
  Description of Artificial Sequence: Synthetic oligonucleotide
  Target: ANGPTL4; (+) strand; PAM type: YTN; PAM sequence: TTA
aggagaagatgtcctggcct

SEQ ID NO: 17215 - DNA, 20 bp, Artificial Sequence
  Description of Artificial Sequence: Synthetic oligonucleotide
  Target: ANGPTL4; (+) strand; PAM type: YTN; PAM sequence: CTG
gcctggagtccctgagggct

SEQ ID NO: 17216 - DNA, 20 bp, Artificial Sequence
  Description of Artificial Sequence: Synthetic oligonucleotide
  Target: ANGPTL4; (+) strand; PAM type: YTN; PAM sequence: CTG
gagtccctgagggctcacca

SEQ ID NO: 17217 - DNA, 20 bp, Artificial Sequence
  Description of Artificial Sequence: Synthetic oligonucleotide
  Target: ANGPTL4; (+) strand; PAM type: YTN; PAM sequence: CTG
agggctcaccagtctctggg

SEQ ID NO: 17218 - DNA, 20 bp, Artificial Sequence
  Description of Artificial Sequence: Synthetic oligonucleotide
  Target: ANGPTL4; (+) strand; PAM type: YTN; PAM sequence: CTC
accagtctctgggtcaaagc

SEQ ID NO: 17219 - DNA, 20 bp, Artificial Sequence
  Description of Artificial Sequence: Synthetic oligonucleotide
  Target: ANGPTL4; (+) strand; PAM type: YTN; PAM sequence: CTC
tgggtcaaagctgatgggag

SEQ ID NO: 17220 - DNA, 20 bp, Artificial Sequence
  Description of Artificial Sequence: Synthetic oligonucleotide
  Target: ANGPTL4; (+) strand; PAM type: YTN; PAM sequence: CTG
ggtcaaagctgatgggagca

SEQ ID NO: 17221 - DNA, 20 bp, Artificial Sequence
  Description of Artificial Sequence: Synthetic oligonucleotide
  Target: ANGPTL4; (+) strand; PAM type: YTN; PAM sequence: CTG
atgggagcacctccttcctc

SEQ ID NO: 17222 - DNA, 20 bp, Artificial Sequence
  Description of Artificial Sequence: Synthetic oligonucleotide
  Target: ANGPTL4; (+) strand; PAM type: YTN; PAM sequence: CTC
cttcctcagccctgacctgg

SEQ ID NO: 17223 - DNA, 20 bp, Artificial Sequence
  Description of Artificial Sequence: Synthetic oligonucleotide
  Target: ANGPTL4; (+) strand; PAM type: YTN; PAM sequence: CTT
cctcagccctgacctggccc

SEQ ID NO: 17224 - DNA, 20 bp, Artificial Sequence
  Description of Artificial Sequence: Synthetic oligonucleotide
  Target: ANGPTL4; (+) strand; PAM type: YTN; PAM sequence: TTC
ctcagccctgacctggccca

SEQ ID NO: 17225 - DNA, 20 bp, Artificial Sequence
  Description of Artificial Sequence: Synthetic oligonucleotide
  Target: ANGPTL4; (+) strand; PAM type: YTN; PAM sequence: CTC
agccctgacctggcccagcc

SEQ ID NO: 17226 - DNA, 20 bp, Artificial Sequence
  Description of Artificial Sequence: Synthetic oligonucleotide
  Target: ANGPTL4; (+) strand; PAM type: YTN; PAM sequence: CTG
acctggcccagccaggccac

SEQ ID NO: 17227 - DNA, 20 bp, Artificial Sequence
  Description of Artificial Sequence: Synthetic oligonucleotide
  Target: ANGPTL4; (+) strand; PAM type: YTN; PAM sequence: CTG
gcccagccaggccacccaac

SEQ ID NO: 17228 - DNA, 20 bp, Artificial Sequence
  Description of Artificial Sequence: Synthetic oligonucleotide
  Target: ANGPTL4; (+) strand; PAM type: YTN; PAM sequence: CTT
ctcctctgcaagccagtggg

SEQ ID NO: 17229 - DNA, 20 bp, Artificial Sequence
  Description of Artificial Sequence: Synthetic oligonucleotide
  Target: ANGPTL4; (+) strand; PAM type: YTN; PAM sequence: TTC
tcctctgcaagccagtgggc

SEQ ID NO: 17230 - DNA, 20 bp, Artificial Sequence
  Description of Artificial Sequence: Synthetic oligonucleotide
  Target: ANGPTL4; (+) strand; PAM type: YTN; PAM sequence: CTC
ctctgcaagccagtgggctg

SEQ ID NO: 17231 - DNA, 20 bp, Artificial Sequence
  Description of Artificial Sequence: Synthetic oligonucleotide
  Target: ANGPTL4; (+) strand; PAM type: YTN; PAM sequence: CTC
tgcaagccagtgggctgtcc

SEQ ID NO: 17232 - DNA, 20 bp, Artificial Sequence
  Description of Artificial Sequence: Synthetic oligonucleotide
  Target: ANGPTL4; (+) strand; PAM type: YTN; PAM sequence: CTG
caagccagtgggctgtccct

SEQ ID NO: 17233 - DNA, 20 bp, Artificial Sequence
  Description of Artificial Sequence: Synthetic oligonucleotide
  Target: ANGPTL4; (+) strand; PAM type: YTN; PAM sequence: CTG
tccctgaagccctgctgatc

SEQ ID NO: 17234 - DNA, 20 bp, Artificial Sequence
  Description of Artificial Sequence: Synthetic oligonucleotide
  Target: ANGPTL4; (+) strand; PAM type: YTN; PAM sequence: CTG
aagccctgctgatcactgat

SEQ ID NO: 17235 - DNA, 20 bp, Artificial Sequence
  Description of Artificial Sequence: Synthetic oligonucleotide
  Target: ANGPTL4; (+) strand; PAM type: YTN; PAM sequence: CTG
ctgatcactgattggaacag

SEQ ID NO: 17236 - DNA, 20 bp, Artificial Sequence
  Description of Artificial Sequence: Synthetic oligonucleotide
  Target: ANGPTL4; (+) strand; PAM type: YTN; PAM sequence: CTG
atcactgattggaacagagg

SEQ ID NO: 17237 - DNA, 20 bp, Artificial Sequence
  Description of Artificial Sequence: Synthetic oligonucleotide
  Target: ANGPTL4; (+) strand; PAM type: YTN; PAM sequence: CTG
attggaacagaggtggagaa

SEQ ID NO: 17238 - DNA, 20 bp, Artificial Sequence
  Description of Artificial Sequence: Synthetic oligonucleotide
  Target: ANGPTL4; (+) strand; PAM type: YTN; PAM sequence: TTG
gaacagaggtggagaaagag

SEQ ID NO: 17239 - DNA, 20 bp, Artificial Sequence
  Description of Artificial Sequence: Synthetic oligonucleotide
  Target: ANGPTL4; (+) strand; PAM type: YTN; PAM sequence: CTT
gagggacttgagctgcaggg

SEQ ID NO: 17240 - DNA, 20 bp, Artificial Sequence
  Description of Artificial Sequence: Synthetic oligonucleotide
  Target: ANGPTL4; (+) strand; PAM type: YTN; PAM sequence: TTG
agggacttgagctgcagggg

SEQ ID NO: 17241 - DNA, 20 bp, Artificial Sequence
  Description of Artificial Sequence: Synthetic oligonucleotide
  Target: ANGPTL4; (+) strand; PAM type: YTN; PAM sequence: CTT
gagctgcaggggtgctggag

SEQ ID NO: 17242 - DNA, 20 bp, Artificial Sequence
  Description of Artificial Sequence: Synthetic oligonucleotide
  Target: ANGPTL4; (+) strand; PAM type: YTN; PAM sequence: TTG
agctgcaggggtgctggaga

SEQ ID NO: 17243 - DNA, 20 bp, Artificial Sequence
  Description of Artificial Sequence: Synthetic oligonucleotide
  Target: ANGPTL4; (+) strand; PAM type: YTN; PAM sequence: CTG
caggggtgctggagaaggta

SEQ ID NO: 17244 - DNA, 20 bp, Artificial Sequence
  Description of Artificial Sequence: Synthetic oligonucleotide
  Target: ANGPTL4; (+) strand; PAM type: YTN; PAM sequence: CTG
gagaaggtagaaatggggtt

SEQ ID NO: 17245 - DNA, 20 bp, Artificial Sequence
  Description of Artificial Sequence: Synthetic oligonucleotide
  Target: ANGPTL4; (+) strand; PAM type: YTN; PAM sequence: TTC
ggggtgccatcctgaaggtt

SEQ ID NO: 17246 - DNA, 20 bp, Artificial Sequence
  Description of Artificial Sequence: Synthetic oligonucleotide
  Target: ANGPTL4; (+) strand; PAM type: YTN; PAM sequence: CTG
aaggttagaaccttctaggg

SEQ ID NO: 17247 - DNA, 20 bp, Artificial Sequence
  Description of Artificial Sequence: Synthetic oligonucleotide
  Target: ANGPTL4; (+) strand; PAM type: YTN; PAM sequence: TTA
gaaccttctaggggagggtg

SEQ ID NO: 17248 - DNA, 20 bp, Artificial Sequence
  Description of Artificial Sequence: Synthetic oligonucleotide
  Target: ANGPTL4; (+) strand; PAM type: YTN; PAM sequence: CTT
ctaggggagggtgtcatgga

SEQ ID NO: 17249 - DNA, 20 bp, Artificial Sequence
  Description of Artificial Sequence: Synthetic oligonucleotide
  Target: ANGPTL4; (+) strand; PAM type: YTN; PAM sequence: TTC
taggggagggtgtcatggag

SEQ ID NO: 17250 - DNA, 20 bp, Artificial Sequence
  Description of Artificial Sequence: Synthetic oligonucleotide
  Target: ANGPTL4; (+) strand; PAM type: YTN; PAM sequence: CTA
ggggagggtgtcatggagga

SEQ ID NO: 17251 - DNA, 20 bp, Artificial Sequence
  Description of Artificial Sequence: Synthetic oligonucleotide
  Target: ANGPTL4; (+) strand; PAM type: YTN; PAM sequence: TTT
gtagatttgggccctccaca

SEQ ID NO: 17252 - DNA, 20 bp, Artificial Sequence
  Description of Artificial Sequence: Synthetic oligonucleotide
  Target: ANGPTL4; (+) strand; PAM type: YTN; PAM sequence: TTG
tagatttgggccctccacaa

SEQ ID NO: 17253 - DNA, 20 bp, Artificial Sequence
  Description of Artificial Sequence: Synthetic oligonucleotide
  Target: ANGPTL4; (+) strand; PAM type: YTN; PAM sequence: TTT
gggccctccacaatgtcttg

SEQ ID NO: 17254 - DNA, 20 bp, Artificial Sequence
  Description of Artificial Sequence: Synthetic oligonucleotide
  Target: ANGPTL4; (+) strand; PAM type: YTN; PAM sequence: TTG
ggccctccacaatgtcttgg

SEQ ID NO: 17255 - DNA, 20 bp, Artificial Sequence
  Description of Artificial Sequence: Synthetic oligonucleotide
  Target: ANGPTL4; (+) strand; PAM type: YTN; PAM sequence: CTC
cacaatgtcttggggtatgt

SEQ ID NO: 17256 - DNA, 20 bp, Artificial Sequence
  Description of Artificial Sequence: Synthetic oligonucleotide
  Target: ANGPTL4; (+) strand; PAM type: YTN; PAM sequence: CTT
ggggtatgtgggaattaggg

SEQ ID NO: 17257 - DNA, 20 bp, Artificial Sequence
  Description of Artificial Sequence: Synthetic oligonucleotide
  Target: ANGPTL4; (+) strand; PAM type: YTN; PAM sequence: TTG
gggtatgtgggaattagggc

SEQ ID NO: 17258 - DNA, 20 bp, Artificial Sequence
  Description of Artificial Sequence: Synthetic oligonucleotide
  Target: ANGPTL4; (+) strand; PAM type: YTN; PAM sequence: TTA
gggctgggaacccccagctc

SEQ ID NO: 17259 - DNA, 20 bp, Artificial Sequence
  Description of Artificial Sequence: Synthetic oligonucleotide
  Target: ANGPTL4; (+) strand; PAM type: YTN; PAM sequence: CTG
ggaacccccagctcccagac

SEQ ID NO: 17260 - DNA, 20 bp, Artificial Sequence
  Description of Artificial Sequence: Synthetic oligonucleotide
  Target: ANGPTL4; (+) strand; PAM type: YTN; PAM sequence: CTC
ccagaccagaaacactcttg

SEQ ID NO: 17261 - DNA, 20 bp, Artificial Sequence
  Description of Artificial Sequence: Synthetic oligonucleotide
  Target: ANGPTL4; (+) strand; PAM type: YTN; PAM sequence: CTC
ttgtatcttacaaatccaat

SEQ ID NO: 17262 - DNA, 20 bp, Artificial Sequence
  Description of Artificial Sequence: Synthetic oligonucleotide
  Target: ANGPTL4; (+) strand; PAM type: YTN; PAM sequence: CTT
gtatcttacaaatccaatgc

SEQ ID NO: 17263 - DNA, 20 bp, Artificial Sequence
  Description of Artificial Sequence: Synthetic oligonucleotide
  Target: ANGPTL4; (+) strand; PAM type: YTN; PAM sequence: TTG
tatcttacaaatccaatgct

SEQ ID NO: 17264 - DNA, 20 bp, Artificial Sequence
  Description of Artificial Sequence: Synthetic oligonucleotide
  Target: ANGPTL4; (+) strand; PAM type: YTN; PAM sequence: CTT
acaaatccaatgctccaggt

SEQ ID NO: 17265 - DNA, 20 bp, Artificial Sequence
  Description of Artificial Sequence: Synthetic oligonucleotide
  Target: ANGPTL4; (+) strand; PAM type: YTN; PAM sequence: TTA
caaatccaatgctccaggtc

SEQ ID NO: 17266 - DNA, 20 bp, Artificial Sequence
  Description of Artificial Sequence: Synthetic oligonucleotide
  Target: ANGPTL4; (+) strand; PAM type: YTN; PAM sequence: CTC
caggtccctgacccctcttc

SEQ ID NO: 17267 - DNA, 20 bp, Artificial Sequence
  Description of Artificial Sequence: Synthetic oligonucleotide
  Target: ANGPTL4; (+) strand; PAM type: YTN; PAM sequence: CTG
acccctcttcctccttcctc

SEQ ID NO: 17268 - DNA, 20 bp, Artificial Sequence
  Description of Artificial Sequence: Synthetic oligonucleotide
  Target: ANGPTL4; (+) strand; PAM type: YTN; PAM sequence: CTC
ttcctccttcctctcttgtt

SEQ ID NO: 17269 - DNA, 20 bp, Artificial Sequence
  Description of Artificial Sequence: Synthetic oligonucleotide
  Target: ANGPTL4; (+) strand; PAM type: YTN; PAM sequence: CTT
cctccttcctctcttgttct

SEQ ID NO: 17270 - DNA, 20 bp, Artificial Sequence
  Description of Artificial Sequence: Synthetic oligonucleotide
  Target: ANGPTL4; (+) strand; PAM type: YTN; PAM sequence: TTC
ctccttcctctcttgttctc

SEQ ID NO: 17271 - DNA, 20 bp, Artificial Sequence
  Description of Artificial Sequence: Synthetic oligonucleotide
  Target: ANGPTL4; (+) strand; PAM type: YTN; PAM sequence: CTC
cttcctctcttgttctcctc

SEQ ID NO: 17272 - DNA, 20 bp, Artificial Sequence
  Description of Artificial Sequence: Synthetic oligonucleotide
  Target: ANGPTL4; (+) strand; PAM type: YTN; PAM sequence: CTT
cctctcttgttctcctcctc

SEQ ID NO: 17273 - DNA, 20 bp, Artificial Sequence
  Description of Artificial Sequence: Synthetic oligonucleotide
  Target: ANGPTL4; (+) strand; PAM type: YTN; PAM sequence: TTC
ctctcttgttctcctcctcc

SEQ ID NO: 17274 - DNA, 20 bp, Artificial Sequence
  Description of Artificial Sequence: Synthetic oligonucleotide
  Target: ANGPTL4; (+) strand; PAM type: YTN; PAM sequence: CTC
tcttgttctcctcctccctc

SEQ ID NO: 17275 - DNA, 20 bp, Artificial Sequence
  Description of Artificial Sequence: Synthetic oligonucleotide
  Target: ANGPTL4; (+) strand; PAM type: YTN; PAM sequence: CTC
ttgttctcctcctccctccc

SEQ ID NO: 17276 - DNA, 20 bp, Artificial Sequence
  Description of Artificial Sequence: Synthetic oligonucleotide
  Target: ANGPTL4; (+) strand; PAM type: YTN; PAM sequence: CTT
gttctcctcctccctccccg

SEQ ID NO: 17277 - DNA, 20 bp, Artificial Sequence
  Description of Artificial Sequence: Synthetic oligonucleotide
  Target: ANGPTL4; (+) strand; PAM type: YTN; PAM sequence: TTG
ttctcctcctccctccccgc

SEQ ID NO: 17278 - DNA, 20 bp, Artificial Sequence
  Description of Artificial Sequence: Synthetic oligonucleotide
  Target: ANGPTL4; (+) strand; PAM type: YTN; PAM sequence: TTC
tcctcctccctccccgcccc

SEQ ID NO: 17279 - DNA, 20 bp, Artificial Sequence
  Description of Artificial Sequence: Synthetic oligonucleotide
  Target: ANGPTL4; (+) strand; PAM type: YTN; PAM sequence: CTC
ctcctccctccccgcccccg

SEQ ID NO: 17280 - DNA, 20 bp, Artificial Sequence
  Description of Artificial Sequence: Synthetic oligonucleotide
  Target: ANGPTL4; (+) strand; PAM type: YTN; PAM sequence: CTC
ctccctccccgcccccgccg

SEQ ID NO: 17281 - DNA, 20 bp, Artificial Sequence
  Description of Artificial Sequence: Synthetic oligonucleotide
  Target: ANGPTL4; (+) strand; PAM type: YTN; PAM sequence: CTC
cctccccgcccccgccggcc

SEQ ID NO: 17282 - DNA, 20 bp, Artificial Sequence
  Description of Artificial Sequence: Synthetic oligonucleotide
  Target: ANGPTL4; (+) strand; PAM type: YTN; PAM sequence: CTC
cccgcccccgccggccccct

SEQ ID NO: 17283 - DNA, 20 bp, Artificial Sequence
  Description of Artificial Sequence: Synthetic oligonucleotide
  Target: ANGPTL4; (+) strand; PAM type: YTN; PAM sequence: CTC
cccaccgcagaaagtgggct

SEQ ID NO: 17284 - DNA, 20 bp, Artificial Sequence
  Description of Artificial Sequence: Synthetic oligonucleotide
  Target: ANGPTL4; (+) strand; PAM type: YTN; PAM sequence: CTT
ttgctgccaccacaagttgt

SEQ ID NO: 17285 - DNA, 20 bp, Artificial Sequence
  Description of Artificial Sequence: Synthetic oligonucleotide
  Target: ANGPTL4; (+) strand; PAM type: YTN; PAM sequence: TTT
tgctgccaccacaagttgta

SEQ ID NO: 17286 - DNA, 20 bp, Artificial Sequence
  Description of Artificial Sequence: Synthetic oligonucleotide
  Target: ANGPTL4; (+) strand; PAM type: YTN; PAM sequence: TTT
gctgccaccacaagttgtag

SEQ ID NO: 17287 - DNA, 20 bp, Artificial Sequence
  Description of Artificial Sequence: Synthetic oligonucleotide
  Target: ANGPTL4; (+) strand; PAM type: YTN; PAM sequence: TTG
ctgccaccacaagttgtagg

SEQ ID NO: 17288 - DNA, 20 bp, Artificial Sequence
  Description of Artificial Sequence: Synthetic oligonucleotide
  Target: ANGPTL4; (+) strand; PAM type: YTN; PAM sequence: CTG
ccaccacaagttgtaggtgc

SEQ ID NO: 17289 - DNA, 20 bp, Artificial Sequence
  Description of Artificial Sequence: Synthetic oligonucleotide
  Target: ANGPTL4; (+) strand; PAM type: YTN; PAM sequence: TTG
taggtgctttattcccaaat

SEQ ID NO: 17290 - DNA, 20 bp, Artificial Sequence
  Description of Artificial Sequence: Synthetic oligonucleotide
  Target: ANGPTL4; (+) strand; PAM type: YTN; PAM sequence: CTT
tattcccaaatctccgttca

SEQ ID NO: 17291 - DNA, 20 bp, Artificial Sequence
  Description of Artificial Sequence: Synthetic oligonucleotide
  Target: ANGPTL4; (+) strand; PAM type: YTN; PAM sequence: TTT
attcccaaatctccgttcat

SEQ ID NO: 17292 - DNA, 20 bp, Artificial Sequence
  Description of Artificial Sequence: Synthetic oligonucleotide
  Target: ANGPTL4; (+) strand; PAM type: YTN; PAM sequence: TTA
ttcccaaatctccgttcatc

SEQ ID NO: 17293 - DNA, 20 bp, Artificial Sequence
  Description of Artificial Sequence: Synthetic oligonucleotide
  Target: ANGPTL4; (+) strand; PAM type: YTN; PAM sequence: TTC
ccaaatctccgttcatctcg

SEQ ID NO: 17294 - DNA, 20 bp, Artificial Sequence
  Description of Artificial Sequence: Synthetic oligonucleotide
  Target: ANGPTL4; (+) strand; PAM type: YTN; PAM sequence: CTC
cgttcatctcgaaccacagc

SEQ ID NO: 17295 - DNA, 20 bp, Artificial Sequence
  Description of Artificial Sequence: Synthetic oligonucleotide
  Target: ANGPTL4; (+) strand; PAM type: YTN; PAM sequence: TTC
atctcgaaccacagcatgtc

SEQ ID NO: 17296 - DNA, 20 bp, Artificial Sequence
  Description of Artificial Sequence: Synthetic oligonucleotide
  Target: ANGPTL4; (+) strand; PAM type: YTN; PAM sequence: CTC
gaaccacagcatgtccacgt

SEQ ID NO: 17297 - DNA, 20 bp, Artificial Sequence
  Description of Artificial Sequence: Synthetic oligonucleotide
  Target: ANGPTL4; (+) strand; PAM type: YTN; PAM sequence: CTC
gcggttctctaagttcacgg

SEQ ID NO: 17298 - DNA, 20 bp, Artificial Sequence
  Description of Artificial Sequence: Synthetic oligonucleotide
  Target: ANGPTL4; (+) strand; PAM type: YTN; PAM sequence: TTC
tctaagttcacggccccaca

SEQ ID NO: 17299 - DNA, 20 bp, Artificial Sequence
  Description of Artificial Sequence: Synthetic oligonucleotide
  Target: ANGPTL4; (+) strand; PAM type: YTN; PAM sequence: CTC
taagttcacggccccacacg

SEQ ID NO: 17300 - DNA, 20 bp, Artificial Sequence
  Description of Artificial Sequence: Synthetic oligonucleotide
  Target: ANGPTL4; (+) strand; PAM type: YTN; PAM sequence: CTA
agttcacggccccacacggt

SEQ ID NO: 17301 - DNA, 20 bp, Artificial Sequence
  Description of Artificial Sequence: Synthetic oligonucleotide
  Target: ANGPTL4; (+) strand; PAM type: YTN; PAM sequence: TTC
acggccccacacggtttctc

SEQ ID NO: 17302 - DNA, 20 bp, Artificial Sequence
  Description of Artificial Sequence: Synthetic oligonucleotide
  Target: ANGPTL4; (+) strand; PAM type: YTN; PAM sequence: TTT
ctctgtggtcctcatccttc

SEQ ID NO: 17303 - DNA, 20 bp, Artificial Sequence
  Description of Artificial Sequence: Synthetic oligonucleotide
  Target: ANGPTL4; (+) strand; PAM type: YTN; PAM sequence: TTC
tctgtggtcctcatccttcc

SEQ ID NO: 17304 - DNA, 20 bp, Artificial Sequence
  Description of Artificial Sequence: Synthetic oligonucleotide
  Target: ANGPTL4; (+) strand; PAM type: YTN; PAM sequence: CTC
tgtggtcctcatccttccct

SEQ ID NO: 17305 - DNA, 20 bp, Artificial Sequence
  Description of Artificial Sequence: Synthetic oligonucleotide
  Target: ANGPTL4; (+) strand; PAM type: YTN; PAM sequence: CTG
tggtcctcatccttccctgc

SEQ ID NO: 17306 - DNA, 20 bp, Artificial Sequence
  Description of Artificial Sequence: Synthetic oligonucleotide
  Target: ANGPTL4; (+) strand; PAM type: YTN; PAM sequence: CTC
atccttccctgcatctgtgg

SEQ ID NO: 17307 - DNA, 20 bp, Artificial Sequence
  Description of Artificial Sequence: Synthetic oligonucleotide
  Target: ANGPTL4; (+) strand; PAM type: YTN; PAM sequence: CTT
ccctgcatctgtggctgtcc

SEQ ID NO: 17308 - DNA, 20 bp, Artificial Sequence
  Description of Artificial Sequence: Synthetic oligonucleotide
  Target: ANGPTL4; (+) strand; PAM type: YTN; PAM sequence: TTC
cctgcatctgtggctgtcca

SEQ ID NO: 17309 - DNA, 20 bp, Artificial Sequence
  Description of Artificial Sequence: Synthetic oligonucleotide
  Target: ANGPTL4; (+) strand; PAM type: YTN; PAM sequence: CTG
catctgtggctgtccacagc

SEQ ID NO: 17310 - DNA, 20 bp, Artificial Sequence
  Description of Artificial Sequence: Synthetic oligonucleotide
  Target: ANGPTL4; (+) strand; PAM type: YTN; PAM sequence: CTG
tggctgtccacagccaactg

SEQ ID NO: 17311 - DNA, 20 bp, Artificial Sequence
  Description of Artificial Sequence: Synthetic oligonucleotide
  Target: ANGPTL4; (+) strand; PAM type: YTN; PAM sequence: CTG
tccacagccaactgggtgaa

SEQ ID NO: 17312 - DNA, 20 bp, Artificial Sequence
  Description of Artificial Sequence: Synthetic oligonucleotide
  Target: ANGPTL4; (+) strand; PAM type: YTN; PAM sequence: CTG
ggtgaaagtttggatccccc

SEQ ID NO: 17313 - DNA, 20 bp, Artificial Sequence
  Description of Artificial Sequence: Synthetic oligonucleotide
  Target: ANGPTL4; (+) strand; PAM type: YTN; PAM sequence: TTT
ggatccccctctcacaccct

SEQ ID NO: 17314 - DNA, 20 bp, Artificial Sequence
  Description of Artificial Sequence: Synthetic oligonucleotide
  Target: ANGPTL4; (+) strand; PAM type: YTN; PAM sequence: TTG
gatccccctctcacacccta

SEQ ID NO: 17315 - DNA, 20 bp, Artificial Sequence
  Description of Artificial Sequence: Synthetic oligonucleotide
  Target: ANGPTL4; (+) strand; PAM type: YTN; PAM sequence: CTC
tcacaccctagggtcagtgg

SEQ ID NO: 17316 - DNA, 20 bp, Artificial Sequence
  Description of Artificial Sequence: Synthetic oligonucleotide
  Target: ANGPTL4; (+) strand; PAM type: YTN; PAM sequence: CTC
acaccctagggtcagtggca

SEQ ID NO: 17317 - DNA, 20 bp, Artificial Sequence
  Description of Artificial Sequence: Synthetic oligonucleotide
  Target: ANGPTL4; (+) strand; PAM type: YTN; PAM sequence: CTA
gggtcagtggcaggcttcca

SEQ ID NO: 17318 - DNA, 20 bp, Artificial Sequence
  Description of Artificial Sequence: Synthetic oligonucleotide
  Target: ANGPTL4; (+) strand; PAM type: YTN; PAM sequence: CTT
ccagcactgtagacctgagg

SEQ ID NO: 17319 - DNA, 20 bp, Artificial Sequence
  Description of Artificial Sequence: Synthetic oligonucleotide
  Target: ANGPTL4; (+) strand; PAM type: YTN; PAM sequence: TTC
cagcactgtagacctgaggg

SEQ ID NO: 17320 - DNA, 20 bp, Artificial Sequence
  Description of Artificial Sequence: Synthetic oligonucleotide
  Target: ANGPTL4; (+) strand; PAM type: YTN; PAM sequence: CTG
tagacctgagggttctctcc

SEQ ID NO: 17321 - DNA, 20 bp, Artificial Sequence
  Description of Artificial Sequence: Synthetic oligonucleotide
  Target: ANGPTL4; (+) strand; PAM type: YTN; PAM sequence: CTG
agggttctctcctccccaag

SEQ ID NO: 17322 - DNA, 20 bp, Artificial Sequence
  Description of Artificial Sequence: Synthetic oligonucleotide
  Target: ANGPTL4; (+) strand; PAM type: YTN; PAM sequence: TTC
tctcctccccaagctcccgc

SEQ ID NO: 17323 - DNA, 20 bp, Artificial Sequence
  Description of Artificial Sequence: Synthetic oligonucleotide
  Target: ANGPTL4; (+) strand; PAM type: YTN; PAM sequence: CTC
tcctccccaagctcccgctc

SEQ ID NO: 17324 - DNA, 20 bp, Artificial Sequence
  Description of Artificial Sequence: Synthetic oligonucleotide
  Target: ANGPTL4; (+) strand; PAM type: YTN; PAM sequence: CTC
ctccccaagctcccgctcct

SEQ ID NO: 17325 - DNA, 20 bp, Artificial Sequence
  Description of Artificial Sequence: Synthetic oligonucleotide
  Target: ANGPTL4; (+) strand; PAM type: YTN; PAM sequence: CTC
cccaagctcccgctccttcc

SEQ ID NO: 17326 - DNA, 20 bp, Artificial Sequence
  Description of Artificial Sequence: Synthetic oligonucleotide
  Target: ANGPTL4; (+) strand; PAM type: YTN; PAM sequence: CTC
ccgctccttcccacctccgt

SEQ ID NO: 17327 - DNA, 20 bp, Artificial Sequence
  Description of Artificial Sequence: Synthetic oligonucleotide
  Target: ANGPTL4; (+) strand; PAM type: YTN; PAM sequence: CTC
cttcccacctccgtgctgcc

SEQ ID NO: 17328 - DNA, 20 bp, Artificial Sequence
  Description of Artificial Sequence: Synthetic oligonucleotide
  Target: ANGPTL4; (+) strand; PAM type: YTN; PAM sequence: CTT
cccacctccgtgctgcccgc

SEQ ID NO: 17329 - DNA, 20 bp, Artificial Sequence
  Description of Artificial Sequence: Synthetic oligonucleotide
  Target: ANGPTL4; (+) strand; PAM type: YTN; PAM sequence: TTC
ccacctccgtgctgcccgcc

SEQ ID NO: 17330 - DNA, 20 bp, Artificial Sequence
  Description of Artificial Sequence: Synthetic oligonucleotide
  Target: ANGPTL4; (+) strand; PAM type: YTN; PAM sequence: CTC
cgtgctgcccgcccccaacc

SEQ ID NO: 17331 - DNA, 20 bp, Artificial Sequence
  Description of Artificial Sequence: Synthetic oligonucleotide
  Target: ANGPTL4; (+) strand; PAM type: YTN; PAM sequence: CTG
cccgcccccaaccccgccag

SEQ ID NO: 17332 - DNA, 20 bp, Artificial Sequence
  Description of Artificial Sequence: Synthetic oligonucleotide
  Target: ANGPTL4; (+) strand; PAM type: YTN; PAM sequence: CTA
gcatctcagcgtggtcaggg

SEQ ID NO: 17333 - DNA, 20 bp, Artificial Sequence
  Description of Artificial Sequence: Synthetic oligonucleotide
  Target: ANGPTL4; (+) strand; PAM type: YTN; PAM sequence: CTC
agcgtggtcagggtcctgtc

SEQ ID NO: 17334 - DNA, 20 bp, Artificial Sequence
  Description of Artificial Sequence: Synthetic oligonucleotide
  Target: ANGPTL4; (+) strand; PAM type: YTN; PAM sequence: CTG
tccaccctcccaaagccacc

SEQ ID NO: 17335 - DNA, 20 bp, Artificial Sequence
  Description of Artificial Sequence: Synthetic oligonucleotide
  Target: ANGPTL4; (+) strand; PAM type: YTN; PAM sequence: CTC
ccaaagccaccatcccagga

SEQ ID NO: 17336 - DNA, 20 bp, Artificial Sequence
  Description of Artificial Sequence: Synthetic oligonucleotide
  Target: ANGPTL4; (+) strand; PAM type: YTN; PAM sequence: CTT
ctggagggtgacgggggaag

SEQ ID NO: 17337 - DNA, 20 bp, Artificial Sequence
  Description of Artificial Sequence: Synthetic oligonucleotide
  Target: ANGPTL4; (+) strand; PAM type: YTN; PAM sequence: TTC
tggagggtgacgggggaagg

SEQ ID NO: 17338 - DNA, 20 bp, Artificial Sequence
  Description of Artificial Sequence: Synthetic oligonucleotide
  Target: ANGPTL4; (+) strand; PAM type: YTN; PAM sequence: CTG
gagggtgacgggggaaggca

SEQ ID NO: 17339 - DNA, 20 bp, Artificial Sequence
  Description of Artificial Sequence: Synthetic oligonucleotide
  Target: ANGPTL4; (+) strand; PAM type: YTN; PAM sequence: CTG
gctgggaaatgcggtggaag

SEQ ID NO: 17340 - DNA, 20 bp, Artificial Sequence
  Description of Artificial Sequence: Synthetic oligonucleotide
  Target: ANGPTL4; (+) strand; PAM type: YTN; PAM sequence: CTG
ggaaatgcggtggaaggggg

SEQ ID NO: 17341 - DNA, 20 bp, Artificial Sequence
  Description of Artificial Sequence: Synthetic oligonucleotide
  Target: ANGPTL4; (+) strand; PAM type: YTN; PAM sequence: TTC
tgtgggttcgggactcccag

SEQ ID NO: 17342 - DNA, 20 bp, Artificial Sequence
  Description of Artificial Sequence: Synthetic oligonucleotide
  Target: ANGPTL4; (+) strand; PAM type: YTN; PAM sequence: CTG
tgggttcgggactcccagac

SEQ ID NO: 17343 - DNA, 20 bp, Artificial Sequence
  Description of Artificial Sequence: Synthetic oligonucleotide
  Target: ANGPTL4; (+) strand; PAM type: YTN; PAM sequence: TTC
gggactcccagactcttggc

SEQ ID NO: 17344 - DNA, 20 bp, Artificial Sequence
  Description of Artificial Sequence: Synthetic oligonucleotide
  Target: ANGPTL4; (+) strand; PAM type: YTN; PAM sequence: CTC
ccagactcttggctcaggcc

SEQ ID NO: 17345 - DNA, 20 bp, Artificial Sequence
  Description of Artificial Sequence: Synthetic oligonucleotide
  Target: ANGPTL4; (+) strand; PAM type: YTN; PAM sequence: CTC
ttggctcaggcccgccaagt

SEQ ID NO: 17346 - DNA, 20 bp, Artificial Sequence
  Description of Artificial Sequence: Synthetic oligonucleotide
  Target: ANGPTL4; (+) strand; PAM type: YTN; PAM sequence: CTT
ggctcaggcccgccaagtag

SEQ ID NO: 17347 - DNA, 20 bp, Artificial Sequence
  Description of Artificial Sequence: Synthetic oligonucleotide
  Target: ANGPTL4; (+) strand; PAM type: YTN; PAM sequence: TTG
gctcaggcccgccaagtagg

SEQ ID NO: 17348 - DNA, 20 bp, Artificial Sequence
  Description of Artificial Sequence: Synthetic oligonucleotide
  Target: ANGPTL4; (+) strand; PAM type: YTN; PAM sequence: CTC
aggcccgccaagtaggagaa

SEQ ID NO: 17349 - DNA, 20 bp, Artificial Sequence
  Description of Artificial Sequence: Synthetic oligonucleotide
  Target: ANGPTL4; (+) strand; PAM type: YTN; PAM sequence: TTC
agagctgggaaggcgaacag

SEQ ID NO: 17350 - DNA, 20 bp, Artificial Sequence
  Description of Artificial Sequence: Synthetic oligonucleotide
  Target: ANGPTL4; (+) strand; PAM type: YTN; PAM sequence: CTG
ggaaggcgaacagctggcat

SEQ ID NO: 17351 - DNA, 20 bp, Artificial Sequence
  Description of Artificial Sequence: Synthetic oligonucleotide
  Target: ANGPTL4; (+) strand; PAM type: YTN; PAM sequence: CTG
gcattcatggaagccacact

SEQ ID NO: 17352 - DNA, 20 bp, Artificial Sequence
  Description of Artificial Sequence: Synthetic oligonucleotide
  Target: ANGPTL4; (+) strand; PAM type: YTN; PAM sequence: TTC
atggaagccacactggtggt

SEQ ID NO: 17353 - DNA, 20 bp, Artificial Sequence
  Description of Artificial Sequence: Synthetic oligonucleotide
  Target: ANGPTL4; (+) strand; PAM type: YTN; PAM sequence: CTG
gtggtttggccgcgtgccca

SEQ ID NO: 17354 - DNA, 20 bp, Artificial Sequence
  Description of Artificial Sequence: Synthetic oligonucleotide
  Target: ANGPTL4; (+) strand; PAM type: YTN; PAM sequence: TTT
ggccgcgtgcccatccttac

SEQ ID NO: 17355 - DNA, 20 bp, Artificial Sequence
  Description of Artificial Sequence: Synthetic oligonucleotide
  Target: ANGPTL4; (+) strand; PAM type: YTN; PAM sequence: TTG
gccgcgtgcccatccttact

SEQ ID NO: 17356 - DNA, 20 bp, Artificial Sequence
  Description of Artificial Sequence: Synthetic oligonucleotide
  Target: ANGPTL4; (+) strand; PAM type: YTN; PAM sequence: CTT
actggatgggaggaaagtag

SEQ ID NO: 17357 - DNA, 20 bp, Artificial Sequence
  Description of Artificial Sequence: Synthetic oligonucleotide
  Target: ANGPTL4; (+) strand; PAM type: YTN; PAM sequence: TTA
ctggatgggaggaaagtagg

SEQ ID NO: 17358 - DNA, 20 bp, Artificial Sequence
  Description of Artificial Sequence: Synthetic oligonucleotide
  Target: ANGPTL4; (+) strand; PAM type: YTN; PAM sequence: CTG
gatgggaggaaagtagggga

SEQ ID NO: 17359 - DNA, 20 bp, Artificial Sequence
  Description of Artificial Sequence: Synthetic oligonucleotide
  Target: ANGPTL4; (+) strand; PAM type: YTN; PAM sequence: CTG
aggggccggaaagcgtcttc

SEQ ID NO: 17360 - DNA, 20 bp, Artificial Sequence
  Description of Artificial Sequence: Synthetic oligonucleotide
  Target: ANGPTL4; (+) strand; PAM type: YTN; PAM sequence: CTT
cctggtcactctgggcccgc

SEQ ID NO: 17361 - DNA, 20 bp, Artificial Sequence
  Description of Artificial Sequence: Synthetic oligonucleotide
  Target: ANGPTL4; (+) strand; PAM type: YTN; PAM sequence: TTC
ctggtcactctgggcccgcc

SEQ ID NO: 17362 - DNA, 20 bp, Artificial Sequence
  Description of Artificial Sequence: Synthetic oligonucleotide
  Target: ANGPTL4; (+) strand; PAM type: YTN; PAM sequence: CTG
gtcactctgggcccgccccc

SEQ ID NO: 17363 - DNA, 20 bp, Artificial Sequence
  Description of Artificial Sequence: Synthetic oligonucleotide
  Target: ANGPTL4; (+) strand; PAM type: YTN; PAM sequence: CTC
tgggcccgcccccaccccca

SEQ ID NO: 17364 - DNA, 20 bp, Artificial Sequence
  Description of Artificial Sequence: Synthetic oligonucleotide
  Target: ANGPTL4; (+) strand; PAM type: YTN; PAM sequence: CTG
ggcccgcccccacccccacc

SEQ ID NO: 17365 - DNA, 20 bp, Artificial Sequence
  Description of Artificial Sequence: Synthetic oligonucleotide
  Target: ANGPTL4; (+) strand; PAM type: YTN; PAM sequence: CTC
atttcgacctttcccctact

SEQ ID NO: 17366 - DNA, 20 bp, Artificial Sequence
  Description of Artificial Sequence: Synthetic oligonucleotide
  Target: ANGPTL4; (+) strand; PAM type: YTN; PAM sequence: TTT
cgacctttcccctacttttc

SEQ ID NO: 17367 - DNA, 20 bp, Artificial Sequence
  Description of Artificial Sequence: Synthetic oligonucleotide
  Target: ANGPTL4; (+) strand; PAM type: YTN; PAM sequence: TTC
gacctttcccctacttttcc

SEQ ID NO: 17368 - DNA, 20 bp, Artificial Sequence
  Description of Artificial Sequence: Synthetic oligonucleotide
  Target: ANGPTL4; (+) strand; PAM type: YTN; PAM sequence: CTT
tcccctacttttccggctgg

SEQ ID NO: 17369 - DNA, 20 bp, Artificial Sequence
  Description of Artificial Sequence: Synthetic oligonucleotide
  Target: ANGPTL4; (+) strand; PAM type: YTN; PAM sequence: TTT
cccctacttttccggctggg

SEQ ID NO: 17370 - DNA, 20 bp, Artificial Sequence
  Description of Artificial Sequence: Synthetic oligonucleotide
  Target: ANGPTL4; (+) strand; PAM type: YTN; PAM sequence: TTC
ccctacttttccggctgggc

SEQ ID NO: 17371 - DNA, 20 bp, Artificial Sequence
  Description of Artificial Sequence: Synthetic oligonucleotide
  Target: ANGPTL4; (+) strand; PAM type: YTN; PAM sequence: CTA
cttttccggctgggctgggg

SEQ ID NO: 17372 - DNA, 20 bp, Artificial Sequence
  Description of Artificial Sequence: Synthetic oligonucleotide
  Target: ANGPTL4; (+) strand; PAM type: YTN; PAM sequence: CTT
ttccggctgggctgggggcg

SEQ ID NO: 17373 - DNA, 20 bp, Artificial Sequence
  Description of Artificial Sequence: Synthetic oligonucleotide
  Target: ANGPTL4; (+) strand; PAM type: YTN; PAM sequence: TTT
tccggctgggctgggggcgg

SEQ ID NO: 17374 - DNA, 20 bp, Artificial Sequence
  Description of Artificial Sequence: Synthetic oligonucleotide
  Target: ANGPTL4; (+) strand; PAM type: YTN; PAM sequence: TTT
ccggctgggctgggggcggt

SEQ ID NO: 17375 - DNA, 20 bp, Artificial Sequence
  Description of Artificial Sequence: Synthetic oligonucleotide
  Target: ANGPTL4; (+) strand; PAM type: YTN; PAM sequence: TTC
cggctgggctgggggcggtt

SEQ ID NO: 17376 - DNA, 20 bp, Artificial Sequence
  Description of Artificial Sequence: Synthetic oligonucleotide
  Target: ANGPTL4; (+) strand; PAM type: YTN; PAM sequence: CTG
ggctgggggcggttcctccc

SEQ ID NO: 17377 - DNA, 20 bp, Artificial Sequence
  Description of Artificial Sequence: Synthetic oligonucleotide
  Target: ANGPTL4; (+) strand; PAM type: YTN; PAM sequence: CTG
ggggcggttcctcccagtct

SEQ ID NO: 17378 - DNA, 20 bp, Artificial Sequence
  Description of Artificial Sequence: Synthetic oligonucleotide
  Target: ANGPTL4; (+) strand; PAM type: YTN; PAM sequence: TTC
ctcccagtctggagcgtctg

SEQ ID NO: 17379 - DNA, 20 bp, Artificial Sequence
  Description of Artificial Sequence: Synthetic oligonucleotide
  Target: ANGPTL4; (+) strand; PAM type: YTN; PAM sequence: CTC
ccagtctggagcgtctgagc

SEQ ID NO: 17380 - DNA, 20 bp, Artificial Sequence
  Description of Artificial Sequence: Synthetic oligonucleotide
  Target: ANGPTL4; (+) strand; PAM type: YTN; PAM sequence: CTG
gagcgtctgagcctccagac

SEQ ID NO: 17381 - DNA, 20 bp, Artificial Sequence
  Description of Artificial Sequence: Synthetic oligonucleotide
  Target: ANGPTL4; (+) strand; PAM type: YTN; PAM sequence: CTG
agcctccagacgtgctcaac

SEQ ID NO: 17382 - DNA, 20 bp, Artificial Sequence
  Description of Artificial Sequence: Synthetic oligonucleotide
  Target: ANGPTL4; (+) strand; PAM type: YTN; PAM sequence: CTC
cagacgtgctcaacgccatc

SEQ ID NO: 17383 - DNA, 20 bp, Artificial Sequence
  Description of Artificial Sequence: Synthetic oligonucleotide
  Target: ANGPTL4; (+) strand; PAM type: YTN; PAM sequence: CTC
aacgccatcctcccctcctc

SEQ ID NO: 17384 - DNA, 20 bp, Artificial Sequence
  Description of Artificial Sequence: Synthetic oligonucleotide
  Target: ANGPTL4; (+) strand; PAM type: YTN; PAM sequence: CTC
ccctcctccctccctctttc

SEQ ID NO: 17385 - DNA, 20 bp, Artificial Sequence
  Description of Artificial Sequence: Synthetic oligonucleotide
  Target: ANGPTL4; (+) strand; PAM type: YTN; PAM sequence: CTC
ctccctccctctttctttcc

SEQ ID NO: 17386 - DNA, 20 bp, Artificial Sequence
  Description of Artificial Sequence: Synthetic oligonucleotide
  Target: ANGPTL4; (+) strand; PAM type: YTN; PAM sequence: CTC
cctccctctttctttcctca

SEQ ID NO: 17387 - DNA, 20 bp, Artificial Sequence
  Description of Artificial Sequence: Synthetic oligonucleotide
  Target: ANGPTL4; (+) strand; PAM type: YTN; PAM sequence: CTC
cctctttctttcctcaaccc

SEQ ID NO: 17388 - DNA, 20 bp, Artificial Sequence
  Description of Artificial Sequence: Synthetic oligonucleotide
  Target: ANGPTL4; (+) strand; PAM type: YTN; PAM sequence: CTC
tttctttcctcaaccctgcc

SEQ ID NO: 17389 - DNA, 20 bp, Artificial Sequence
  Description of Artificial Sequence: Synthetic oligonucleotide
  Target: ANGPTL4; (+) strand; PAM type: YTN; PAM sequence: CTT
tctttcctcaaccctgcctc

SEQ ID NO: 17390 - DNA, 20 bp, Artificial Sequence
  Description of Artificial Sequence: Synthetic oligonucleotide
  Target: ANGPTL4; (+) strand; PAM type: YTN; PAM sequence: TTT
ctttcctcaaccctgcctcc

SEQ ID NO: 17391 - DNA, 20 bp, Artificial Sequence
  Description of Artificial Sequence: Synthetic oligonucleotide
  Target: ANGPTL4; (+) strand; PAM type: YTN; PAM sequence: TTC
tttcctcaaccctgcctcct

SEQ ID NO: 17392 - DNA, 20 bp, Artificial Sequence
  Description of Artificial Sequence: Synthetic oligonucleotide
  Target: ANGPTL4; (+) strand; PAM type: YTN; PAM sequence: CTT
tcctcaaccctgcctcctct

SEQ ID NO: 17393 - DNA, 20 bp, Artificial Sequence
  Description of Artificial Sequence: Synthetic oligonucleotide
  Target: ANGPTL4; (+) strand; PAM type: YTN; PAM sequence: TTT
cctcaaccctgcctcctctc

SEQ ID NO: 17394 - DNA, 20 bp, Artificial Sequence
  Description of Artificial Sequence: Synthetic oligonucleotide
  Target: ANGPTL4; (+) strand; PAM type: YTN; PAM sequence: TTC
ctcaaccctgcctcctctcc

SEQ ID NO: 17395 - DNA, 20 bp, Artificial Sequence
  Description of Artificial Sequence: Synthetic oligonucleotide
  Target: ANGPTL4; (+) strand; PAM type: YTN; PAM sequence: CTC
aaccctgcctcctctccctc

SEQ ID NO: 17396 - DNA, 20 bp, Artificial Sequence
  Description of Artificial Sequence: Synthetic oligonucleotide
  Target: ANGPTL4; (+) strand; PAM type: YTN; PAM sequence: CTG
cctcctctccctctaggagc

SEQ ID NO: 17397 - DNA, 20 bp, Artificial Sequence
  Description of Artificial Sequence: Synthetic oligonucleotide
  Target: ANGPTL4; (+) strand; PAM type: YTN; PAM sequence: CTC
ctctccctctaggagctggg

SEQ ID NO: 17398 - DNA, 20 bp, Artificial Sequence
  Description of Artificial Sequence: Synthetic oligonucleotide
  Target: ANGPTL4; (+) strand; PAM type: YTN; PAM sequence: CTC
tccctctaggagctgggacc

SEQ ID NO: 17399 - DNA, 20 bp, Artificial Sequence
  Description of Artificial Sequence: Synthetic oligonucleotide
  Target: ANGPTL4; (+) strand; PAM type: YTN; PAM sequence: CTC
cctctaggagctgggacccc

SEQ ID NO: 17400 - DNA, 20 bp, Artificial Sequence
  Description of Artificial Sequence: Synthetic oligonucleotide
  Target: ANGPTL4; (+) strand; PAM type: YTN; PAM sequence: CTC
taggagctgggaccccaggc

SEQ ID NO: 17401 - DNA, 20 bp, Artificial Sequence
  Description of Artificial Sequence: Synthetic oligonucleotide
  Target: ANGPTL4; (+) strand; PAM type: YTN; PAM sequence: CTA
ggagctgggaccccaggcag

SEQ ID NO: 17402 - DNA, 20 bp, Artificial Sequence
  Description of Artificial Sequence: Synthetic oligonucleotide
  Target: ANGPTL4; (+) strand; PAM type: YTN; PAM sequence: CTG
ggaccccaggcagagcctct

SEQ ID NO: 17403 - DNA, 20 bp, Artificial Sequence
  Description of Artificial Sequence: Synthetic oligonucleotide
  Target: ANGPTL4; (+) strand; PAM type: YTN; PAM sequence: CTC
tgagatgctcctgctcagca

SEQ ID NO: 17404 - DNA, 20 bp, Artificial Sequence
  Description of Artificial Sequence: Synthetic oligonucleotide
  Target: ANGPTL4; (+) strand; PAM type: YTN; PAM sequence: CTG
agatgctcctgctcagcaca

SEQ ID NO: 17405 - DNA, 20 bp, Artificial Sequence
  Description of Artificial Sequence: Synthetic oligonucleotide
  Target: ANGPTL4; (+) strand; PAM type: YTN; PAM sequence: CTC
ctgctcagcacagttcttcc

SEQ ID NO: 17406 - DNA, 20 bp, Artificial Sequence
  Description of Artificial Sequence: Synthetic oligonucleotide
  Target: ANGPTL4; (+) strand; PAM type: YTN; PAM sequence: CTG
ctcagcacagttcttcccgt

SEQ ID NO: 17407 - DNA, 20 bp, Artificial Sequence
  Description of Artificial Sequence: Synthetic oligonucleotide
  Target: ANGPTL4; (+) strand; PAM type: YTN; PAM sequence: CTC
agcacagttcttcccgttct

SEQ ID NO: 17408 - DNA, 20 bp, Artificial Sequence
  Description of Artificial Sequence: Synthetic oligonucleotide
  Target: ANGPTL4; (+) strand; PAM type: YTN; PAM sequence: TTC
ttcccgttctggacctgctg

SEQ ID NO: 17409 - DNA, 20 bp, Artificial Sequence
  Description of Artificial Sequence: Synthetic oligonucleotide
  Target: ANGPTL4; (+) strand; PAM type: YTN; PAM sequence: CTT
cccgttctggacctgctgcc

SEQ ID NO: 17410 - DNA, 20 bp, Artificial Sequence
  Description of Artificial Sequence: Synthetic oligonucleotide
  Target: ANGPTL4; (+) strand; PAM type: YTN; PAM sequence: TTC
ccgttctggacctgctgcct

SEQ ID NO: 17411 - DNA, 20 bp, Artificial Sequence
  Description of Artificial Sequence: Synthetic oligonucleotide
  Target: ANGPTL4; (+) strand; PAM type: YTN; PAM sequence: TTC
tggacctgctgcctcattca

SEQ ID NO: 17412 - DNA, 20 bp, Artificial Sequence
  Description of Artificial Sequence: Synthetic oligonucleotide
  Target: ANGPTL4; (+) strand; PAM type: YTN; PAM sequence: CTG
gacctgctgcctcattcatt

SEQ ID NO: 17413 - DNA, 20 bp, Artificial Sequence
  Description of Artificial Sequence: Synthetic oligonucleotide
  Target: ANGPTL4; (+) strand; PAM type: YTN; PAM sequence: CTG
ctgcctcattcattcattca

SEQ ID NO: 17414 - DNA, 20 bp, Artificial Sequence
  Description of Artificial Sequence: Synthetic oligonucleotide
  Target: ANGPTL4; (+) strand; PAM type: YTN; PAM sequence: CTG
cctcattcattcattcattc

SEQ ID NO: 17415 - DNA, 20 bp, Artificial Sequence
  Description of Artificial Sequence: Synthetic oligonucleotide
  Target: ANGPTL4; (+) strand; PAM type: YTN; PAM sequence: CTC
attcattcattcattcattc

SEQ ID NO: 17416 - DNA, 20 bp, Artificial Sequence
  Description of Artificial Sequence: Synthetic oligonucleotide
  Target: ANGPTL4; (+) strand; PAM type: YTN; PAM sequence: TTC
attcattcattcattcattt

SEQ ID NO: 17417 - DNA, 20 bp, Artificial Sequence
  Description of Artificial Sequence: Synthetic oligonucleotide
  Target: ANGPTL4; (+) strand; PAM type: YTN; PAM sequence: TTC
attcattcattcatttgtca

SEQ ID NO: 17418 - DNA, 20 bp, Artificial Sequence
  Description of Artificial Sequence: Synthetic oligonucleotide
  Target: ANGPTL4; (+) strand; PAM type: YTN; PAM sequence: TTC
attcattcatttgtcaagac

SEQ ID NO: 17419 - DNA, 20 bp, Artificial Sequence
  Description of Artificial Sequence: Synthetic oligonucleotide
  Target: ANGPTL4; (+) strand; PAM type: YTN; PAM sequence: TTC
attcatttgtcaagactgtt

SEQ ID NO: 17420 - DNA, 20 bp, Artificial Sequence
  Description of Artificial Sequence: Synthetic oligonucleotide
  Target: ANGPTL4; (+) strand; PAM type: YTN; PAM sequence: TTC
atttgtcaagactgttttgt

SEQ ID NO: 17421 - DNA, 20 bp, Artificial Sequence
  Description of Artificial Sequence: Synthetic oligonucleotide
  Target: ANGPTL4; (+) strand; PAM type: YTN; PAM sequence: TTT
gtcaagactgttttgtttgc

SEQ ID NO: 17422 - DNA, 20 bp, Artificial Sequence
  Description of Artificial Sequence: Synthetic oligonucleotide
  Target: ANGPTL4; (+) strand; PAM type: YTN; PAM sequence: TTG
tcaagactgttttgtttgct

SEQ ID NO: 17423 - DNA, 20 bp, Artificial Sequence
  Description of Artificial Sequence: Synthetic oligonucleotide
  Target: ANGPTL4; (+) strand; PAM type: YTN; PAM sequence: CTG
ttttgtttgctttttgagac

SEQ ID NO: 17424 - DNA, 20 bp, Artificial Sequence
  Description of Artificial Sequence: Synthetic oligonucleotide
  Target: ANGPTL4; (+) strand; PAM type: YTN; PAM sequence: TTT
tgtttgctttttgagacgga

SEQ ID NO: 17425 - DNA, 20 bp, Artificial Sequence
  Description of Artificial Sequence: Synthetic oligonucleotide
  Target: ANGPTL4; (+) strand; PAM type: YTN; PAM sequence: TTT
gtttgctttttgagacggag

SEQ ID NO: 17426 - DNA, 20 bp, Artificial Sequence
  Description of Artificial Sequence: Synthetic oligonucleotide
  Target: ANGPTL4; (+) strand; PAM type: YTN; PAM sequence: TTG
tttgctttttgagacggagt

SEQ ID NO: 17427 - DNA, 20 bp, Artificial Sequence
  Description of Artificial Sequence: Synthetic oligonucleotide
  Target: ANGPTL4; (+) strand; PAM type: YTN; PAM sequence: TTT
gctttttgagacggagtctc

SEQ ID NO: 17428 - DNA, 20 bp, Artificial Sequence
  Description of Artificial Sequence: Synthetic oligonucleotide
  Target: ANGPTL4; (+) strand; PAM type: YTN; PAM sequence: TTG
ctttttgagacggagtctcg

SEQ ID NO: 17429 - DNA, 20 bp, Artificial Sequence
  Description of Artificial Sequence: Synthetic oligonucleotide
  Target: ANGPTL4; (+) strand; PAM type: YTN; PAM sequence: CTT
tttgagacggagtctcgctc

SEQ ID NO: 17430 - DNA, 20 bp, Artificial Sequence
  Description of Artificial Sequence: Synthetic oligonucleotide
  Target: ANGPTL4; (+) strand; PAM type: YTN; PAM sequence: TTT
ttgagacggagtctcgctct

SEQ ID NO: 17431 - DNA, 20 bp, Artificial Sequence
  Description of Artificial Sequence: Synthetic oligonucleotide
  Target: ANGPTL4; (+) strand; PAM type: YTN; PAM sequence: TTT
tgagacggagtctcgctctg

SEQ ID NO: 17432 - DNA, 20 bp, Artificial Sequence
  Description of Artificial Sequence: Synthetic oligonucleotide
  Target: ANGPTL4; (+) strand; PAM type: YTN; PAM sequence: TTT
gagacggagtctcgctctgt

SEQ ID NO: 17433 - DNA, 20 bp, Artificial Sequence
  Description of Artificial Sequence: Synthetic oligonucleotide
  Target: ANGPTL4; (+) strand; PAM type: YTN; PAM sequence: TTG
agacggagtctcgctctgtt

SEQ ID NO: 17434 - DNA, 20 bp, Artificial Sequence
  Description of Artificial Sequence: Synthetic oligonucleotide
  Target: ANGPTL4; (+) strand; PAM type: YTN; PAM sequence: CTC
gctctgttgtccaggctgga

SEQ ID NO: 17435 - DNA, 20 bp, Artificial Sequence
  Description of Artificial Sequence: Synthetic oligonucleotide
  Target: ANGPTL4; (+) strand; PAM type: YTN; PAM sequence: CTC
tgttgtccaggctggagtgc

SEQ ID NO: 17436 - DNA, 20 bp, Artificial Sequence
  Description of Artificial Sequence: Synthetic oligonucleotide
  Target: ANGPTL4; (+) strand; PAM type: YTN; PAM sequence: CTG
ttgtccaggctggagtgcag

SEQ ID NO: 17437 - DNA, 20 bp, Artificial Sequence
  Description of Artificial Sequence: Synthetic oligonucleotide
  Target: ANGPTL4; (+) strand; PAM type: YTN; PAM sequence: TTG
tccaggctggagtgcagtgg

SEQ ID NO: 17438 - DNA, 20 bp, Artificial Sequence
  Description of Artificial Sequence: Synthetic oligonucleotide
  Target: ANGPTL4; (+) strand; PAM type: YTN; PAM sequence: CTG
gagtgcagtggcgcaatctc

SEQ ID NO: 17439 - DNA, 20 bp, Artificial Sequence
  Description of Artificial Sequence: Synthetic oligonucleotide
  Target: ANGPTL4; (+) strand; PAM type: YTN; PAM sequence: CTC
agctcactgcaacctctgcc

SEQ ID NO: 17440 - DNA, 20 bp, Artificial Sequence
  Description of Artificial Sequence: Synthetic oligonucleotide
  Target: ANGPTL4; (+) strand; PAM type: YTN; PAM sequence: CTC
actgcaacctctgcctccca

SEQ ID NO: 17441 - DNA, 20 bp, Artificial Sequence
  Description of Artificial Sequence: Synthetic oligonucleotide
  Target: ANGPTL4; (+) strand; PAM type: YTN; PAM sequence: CTG
caacctctgcctcccactgg

SEQ ID NO: 17442 - DNA, 20 bp, Artificial Sequence
  Description of Artificial Sequence: Synthetic oligonucleotide
  Target: ANGPTL4; (+) strand; PAM type: YTN; PAM sequence: CTC
tgcctcccactgggttcaag

SEQ ID NO: 17443 - DNA, 20 bp, Artificial Sequence
  Description of Artificial Sequence: Synthetic oligonucleotide
  Target: ANGPTL4; (+) strand; PAM type: YTN; PAM sequence: CTG
cctcccactgggttcaagtg

SEQ ID NO: 17444 - DNA, 20 bp, Artificial Sequence
  Description of Artificial Sequence: Synthetic oligonucleotide
  Target: ANGPTL4; (+) strand; PAM type: YTN; PAM sequence: CTC
ccactgggttcaagtgattc

SEQ ID NO: 17445 - DNA, 20 bp, Artificial Sequence
  Description of Artificial Sequence: Synthetic oligonucleotide
  Target: ANGPTL4; (+) strand; PAM type: YTN; PAM sequence: CTG
ggttcaagtgattctcctgc

SEQ ID NO: 17446 - DNA, 20 bp, Artificial Sequence
  Description of Artificial Sequence: Synthetic oligonucleotide
  Target: ANGPTL4; (+) strand; PAM type: YTN; PAM sequence: TTC
aagtgattctcctgcctcag

SEQ ID NO: 17447 - DNA, 20 bp, Artificial Sequence
  Description of Artificial Sequence: Synthetic oligonucleotide
  Target: ANGPTL4; (+) strand; PAM type: YTN; PAM sequence: TTC
tcctgcctcagcctctcaag

SEQ ID NO: 17448 - DNA, 20 bp, Artificial Sequence
  Description of Artificial Sequence: Synthetic oligonucleotide
  Target: ANGPTL4; (+) strand; PAM type: YTN; PAM sequence: CTC
ctgcctcagcctctcaagta

SEQ ID NO: 17449 - DNA, 20 bp, Artificial Sequence
  Description of Artificial Sequence: Synthetic oligonucleotide
  Target: ANGPTL4; (+) strand; PAM type: YTN; PAM sequence: CTG
cctcagcctctcaagtagat

SEQ ID NO: 17450 - DNA, 20 bp, Artificial Sequence
  Description of Artificial Sequence: Synthetic oligonucleotide
  Target: ANGPTL4; (+) strand; PAM type: YTN; PAM sequence: CTC
agcctctcaagtagatggga

SEQ ID NO: 17451 - DNA, 20 bp, Artificial Sequence
  Description of Artificial Sequence: Synthetic oligonucleotide
  Target: ANGPTL4; (+) strand; PAM type: YTN; PAM sequence: CTC
tcaagtagatgggattatag

SEQ ID NO: 17452 - DNA, 20 bp, Artificial Sequence
  Description of Artificial Sequence: Synthetic oligonucleotide
  Target: ANGPTL4; (+) strand; PAM type: YTN; PAM sequence: CTC
aagtagatgggattataggc

SEQ ID NO: 17453 - DNA, 20 bp, Artificial Sequence
  Description of Artificial Sequence: Synthetic oligonucleotide
  Target: ANGPTL4; (+) strand; PAM type: YTN; PAM sequence: TTA
taggcgcctaccgccaccac

SEQ ID NO: 17454 - DNA, 20 bp, Artificial Sequence
  Description of Artificial Sequence: Synthetic oligonucleotide
  Target: ANGPTL4; (+) strand; PAM type: YTN; PAM sequence: CTA
ccgccaccacgcccagctaa

SEQ ID NO: 17455 - DNA, 20 bp, Artificial Sequence
  Description of Artificial Sequence: Synthetic oligonucleotide
  Target: ANGPTL4; (+) strand; PAM type: YTN; PAM sequence: CTA
atttttattcatttatcaag

SEQ ID NO: 17456 - DNA, 20 bp, Artificial Sequence
  Description of Artificial Sequence: Synthetic oligonucleotide
  Target: ANGPTL4; (+) strand; PAM type: YTN; PAM sequence: TTT
ttattcatttatcaagtctt

SEQ ID NO: 17457 - DNA, 20 bp, Artificial Sequence
  Description of Artificial Sequence: Synthetic oligonucleotide
  Target: ANGPTL4; (+) strand; PAM type: YTN; PAM sequence: TTT
tattcatttatcaagtcttt

SEQ ID NO: 17458 - DNA, 20 bp, Artificial Sequence
  Description of Artificial Sequence: Synthetic oligonucleotide
  Target: ANGPTL4; (+) strand; PAM type: YTN; PAM sequence: TTT
attcatttatcaagtctttt

SEQ ID NO: 17459 - DNA, 20 bp, Artificial Sequence
  Description of Artificial Sequence: Synthetic oligonucleotide
  Target: ANGPTL4; (+) strand; PAM type: YTN; PAM sequence: TTA
ttcatttatcaagtcttttt

SEQ ID NO: 17460 - DNA, 20 bp, Artificial Sequence
  Description of Artificial Sequence: Synthetic oligonucleotide
  Target: ANGPTL4; (+) strand; PAM type: YTN; PAM sequence: TTC
atttatcaagtctttttttt

SEQ ID NO: 17461 - DNA, 20 bp, Artificial Sequence
  Description of Artificial Sequence: Synthetic oligonucleotide
  Target: ANGPTL4; (+) strand; PAM type: YTN; PAM sequence: TTT
atcaagtctttttttttttt

SEQ ID NO: 17462 - DNA, 20 bp, Artificial Sequence
  Description of Artificial Sequence: Synthetic oligonucleotide
  Target: ANGPTL4; (+) strand; PAM type: YTN; PAM sequence: TTA
tcaagtcttttttttttttg

SEQ ID NO: 17463 - DNA, 20 bp, Artificial Sequence
  Description of Artificial Sequence: Synthetic oligonucleotide
  Target: ANGPTL4; (+) strand; PAM type: YTN; PAM sequence: CTT
ttttttttttgagacagagt

SEQ ID NO: 17464 - DNA, 20 bp, Artificial Sequence
  Description of Artificial Sequence: Synthetic oligonucleotide
  Target: ANGPTL4; (+) strand; PAM type: YTN; PAM sequence: TTT
tttttttttgagacagagtc

SEQ ID NO: 17465 - DNA, 20 bp, Artificial Sequence
  Description of Artificial Sequence: Synthetic oligonucleotide
  Target: ANGPTL4; (+) strand; PAM type: YTN; PAM sequence: TTT
ttttttttgagacagagtct

SEQ ID NO: 17466 - DNA, 20 bp, Artificial Sequence
  Description of Artificial Sequence: Synthetic oligonucleotide
  Target: ANGPTL4; (+) strand; PAM type: YTN; PAM sequence: TTT
tttttttgagacagagtctc

SEQ ID NO: 17467 - DNA, 20 bp, Artificial Sequence
  Description of Artificial Sequence: Synthetic oligonucleotide
  Target: ANGPTL4; (+) strand; PAM type: YTN; PAM sequence: TTT
ttttttgagacagagtctca

SEQ ID NO: 17468 - DNA, 20 bp, Artificial Sequence
  Description of Artificial Sequence: Synthetic oligonucleotide
  Target: ANGPTL4; (+) strand; PAM type: YTN; PAM sequence: TTT
tttttgagacagagtctcac

SEQ ID NO: 17469 - DNA, 20 bp, Artificial Sequence
  Description of Artificial Sequence: Synthetic oligonucleotide
  Target: ANGPTL4; (+) strand; PAM type: YTN; PAM sequence: TTT
ttttgagacagagtctcact

SEQ ID NO: 17470 - DNA, 20 bp, Artificial Sequence
  Description of Artificial Sequence: Synthetic oligonucleotide
  Target: ANGPTL4; (+) strand; PAM type: YTN; PAM sequence: TTT
tttgagacagagtctcactc

SEQ ID NO: 17471 - DNA, 20 bp, Artificial Sequence
  Description of Artificial Sequence: Synthetic oligonucleotide
  Target: ANGPTL4; (+) strand; PAM type: YTN; PAM sequence: TTT
ttgagacagagtctcactct

SEQ ID NO: 17472 - DNA, 20 bp, Artificial Sequence
  Description of Artificial Sequence: Synthetic oligonucleotide
  Target: ANGPTL4; (+) strand; PAM type: YTN; PAM sequence: TTT
tgagacagagtctcactctg

SEQ ID NO: 17473 - DNA, 20 bp, Artificial Sequence
  Description of Artificial Sequence: Synthetic oligonucleotide
  Target: ANGPTL4; (+) strand; PAM type: YTN; PAM sequence: TTT
gagacagagtctcactctgt

SEQ ID NO: 17474 - DNA, 20 bp, Artificial Sequence
  Description of Artificial Sequence: Synthetic oligonucleotide
  Target: ANGPTL4; (+) strand; PAM type: YTN; PAM sequence: TTG
agacagagtctcactctgtc

SEQ ID NO: 17475 - DNA, 20 bp, Artificial Sequence
  Description of Artificial Sequence: Synthetic oligonucleotide
  Target: ANGPTL4; (+) strand; PAM type: YTN; PAM sequence: CTC
actctgtcacccaggttgga

SEQ ID NO: 17476 - DNA, 20 bp, Artificial Sequence
  Description of Artificial Sequence: Synthetic oligonucleotide
  Target: ANGPTL4; (+) strand; PAM type: YTN; PAM sequence: CTC
tgtcacccaggttggagtgc

SEQ ID NO: 17477 - DNA, 20 bp, Artificial Sequence
  Description of Artificial Sequence: Synthetic oligonucleotide
  Target: ANGPTL4; (+) strand; PAM type: YTN; PAM sequence: CTG
tcacccaggttggagtgcaa

SEQ ID NO: 17478 - DNA, 20 bp, Artificial Sequence
  Description of Artificial Sequence: Synthetic oligonucleotide
  Target: ANGPTL4; (+) strand; PAM type: YTN; PAM sequence: TTG
gagtgcaatggttcaacctc

SEQ ID NO: 17479 - DNA, 20 bp, Artificial Sequence
  Description of Artificial Sequence: Synthetic oligonucleotide
  Target: ANGPTL4; (+) strand; PAM type: YTN; PAM sequence: TTC
aacctcagctgactgcaacc

SEQ ID NO: 17480 - DNA, 20 bp, Artificial Sequence
  Description of Artificial Sequence: Synthetic oligonucleotide
  Target: ANGPTL4; (+) strand; PAM type: YTN; PAM sequence: CTC
agctgactgcaacctctgcc

SEQ ID NO: 17481 - DNA, 20 bp, Artificial Sequence
  Description of Artificial Sequence: Synthetic oligonucleotide
  Target: ANGPTL4; (+) strand; PAM type: YTN; PAM sequence: CTG
actgcaacctctgcctcccg

SEQ ID NO: 17482 - DNA, 20 bp, Artificial Sequence
  Description of Artificial Sequence: Synthetic oligonucleotide
  Target: ANGPTL4; (+) strand; PAM type: YTN; PAM sequence: CTG
caacctctgcctcccgggtt

SEQ ID NO: 17483 - DNA, 20 bp, Artificial Sequence
  Description of Artificial Sequence: Synthetic oligonucleotide
  Target: ANGPTL4; (+) strand; PAM type: YTN; PAM sequence: CTC
tgcctcccgggttcaagtga

SEQ ID NO: 17484 - DNA, 20 bp, Artificial Sequence
  Description of Artificial Sequence: Synthetic oligonucleotide
  Target: ANGPTL4; (+) strand; PAM type: YTN; PAM sequence: CTG
cctcccgggttcaagtgatt

SEQ ID NO: 17485 - DNA, 20 bp, Artificial Sequence
  Description of Artificial Sequence: Synthetic oligonucleotide
  Target: ANGPTL4; (+) strand; PAM type: YTN; PAM sequence: CTC
ccgggttcaagtgattctcc

SEQ ID NO: 17486 - DNA, 20 bp, Artificial Sequence
  Description of Artificial Sequence: Synthetic oligonucleotide
  Target: ANGPTL4; (+) strand; PAM type: YTN; PAM sequence: TTC
aagtgattctcctgcctctg

SEQ ID NO: 17487 - DNA, 20 bp, Artificial Sequence
  Description of Artificial Sequence: Synthetic oligonucleotide
  Target: ANGPTL4; (+) strand; PAM type: YTN; PAM sequence: TTC
tcctgcctctgcctcctaag

SEQ ID NO: 17488 - DNA, 20 bp, Artificial Sequence
  Description of Artificial Sequence: Synthetic oligonucleotide
  Target: ANGPTL4; (+) strand; PAM type: YTN; PAM sequence: CTC
ctgcctctgcctcctaagga

SEQ ID NO: 17489 - DNA, 20 bp, Artificial Sequence
  Description of Artificial Sequence: Synthetic oligonucleotide
  Target: ANGPTL4; (+) strand; PAM type: YTN; PAM sequence: CTG
cctctgcctcctaaggagct

SEQ ID NO: 17490 - DNA, 20 bp, Artificial Sequence
  Description of Artificial Sequence: Synthetic oligonucleotide
  Target: ANGPTL4; (+) strand; PAM type: YTN; PAM sequence: CTC
tgcctcctaaggagctggga

SEQ ID NO: 17491 - DNA, 20 bp, Artificial Sequence
  Description of Artificial Sequence: Synthetic oligonucleotide
  Target: ANGPTL4; (+) strand; PAM type: YTN; PAM sequence: CTG
cctcctaaggagctgggatt

SEQ ID NO: 17492 - DNA, 20 bp, Artificial Sequence
  Description of Artificial Sequence: Synthetic oligonucleotide
  Target: ANGPTL4; (+) strand; PAM type: YTN; PAM sequence: CTC
ctaaggagctgggattactg

SEQ ID NO: 17493 - DNA, 20 bp, Artificial Sequence
  Description of Artificial Sequence: Synthetic oligonucleotide
  Target: ANGPTL4; (+) strand; PAM type: YTN; PAM sequence: CTA
aggagctgggattactggcg

SEQ ID NO: 17494 - DNA, 20 bp, Artificial Sequence
  Description of Artificial Sequence: Synthetic oligonucleotide
  Target: ANGPTL4; (+) strand; PAM type: YTN; PAM sequence: CTG
ggattactggcgtccaccat

SEQ ID NO: 17495 - DNA, 20 bp, Artificial Sequence
  Description of Artificial Sequence: Synthetic oligonucleotide
  Target: ANGPTL4; (+) strand; PAM type: YTN; PAM sequence: TTA
ctggcgtccaccatcacacc

SEQ ID NO: 17496 - DNA, 20 bp, Artificial Sequence
  Description of Artificial Sequence: Synthetic oligonucleotide
  Target: ANGPTL4; (+) strand; PAM type: YTN; PAM sequence: CTG
gcgtccaccatcacacccag

SEQ ID NO: 17497 - DNA, 20 bp, Artificial Sequence
  Description of Artificial Sequence: Synthetic oligonucleotide
  Target: ANGPTL4; (+) strand; PAM type: YTN; PAM sequence: CTA
atctttgtatgttttactag

SEQ ID NO: 17498 - DNA, 20 bp, Artificial Sequence
  Description of Artificial Sequence: Synthetic oligonucleotide
  Target: ANGPTL4; (+) strand; PAM type: YTN; PAM sequence: CTT
tgtatgttttactagagatg

SEQ ID NO: 17499 - DNA, 20 bp, Artificial Sequence
  Description of Artificial Sequence: Synthetic oligonucleotide
  Target: ANGPTL4; (+) strand; PAM type: YTN; PAM sequence: TTT
gtatgttttactagagatgg

SEQ ID NO: 17500 - DNA, 20 bp, Artificial Sequence
  Description of Artificial Sequence: Synthetic oligonucleotide
  Target: ANGPTL4; (+) strand; PAM type: YTN; PAM sequence: TTG
tatgttttactagagatggg

SEQ ID NO: 17501 - DNA, 20 bp, Artificial Sequence
  Description of Artificial Sequence: Synthetic oligonucleotide
  Target: ANGPTL4; (+) strand; PAM type: YTN; PAM sequence: TTT
tactagagatggggtttggc

SEQ ID NO: 17502 - DNA, 20 bp, Artificial Sequence
  Description of Artificial Sequence: Synthetic oligonucleotide
  Target: ANGPTL4; (+) strand; PAM type: YTN; PAM sequence: TTT
actagagatggggtttggcc

SEQ ID NO: 17503 - DNA, 20 bp, Artificial Sequence
  Description of Artificial Sequence: Synthetic oligonucleotide
  Target: ANGPTL4; (+) strand; PAM type: YTN; PAM sequence: TTA
ctagagatggggtttggcca

SEQ ID NO: 17504 - DNA, 20 bp, Artificial Sequence
  Description of Artificial Sequence: Synthetic oligonucleotide
  Target: ANGPTL4; (+) strand; PAM type: YTN; PAM sequence: CTA
gagatggggtttggccatgt

SEQ ID NO: 17505 - DNA, 20 bp, Artificial Sequence
  Description of Artificial Sequence: Synthetic oligonucleotide
  Target: ANGPTL4; (+) strand; PAM type: YTN; PAM sequence: TTT
ggccatgttgaccaggctgg

SEQ ID NO: 17506 - DNA, 20 bp, Artificial Sequence
  Description of Artificial Sequence: Synthetic oligonucleotide
  Target: ANGPTL4; (+) strand; PAM type: YTN; PAM sequence: TTG
gccatgttgaccaggctggt

SEQ ID NO: 17507 - DNA, 20 bp, Artificial Sequence
  Description of Artificial Sequence: Synthetic oligonucleotide
  Target: ANGPTL4; (+) strand; PAM type: YTN; PAM sequence: TTG
accaggctggtctcaaactc

SEQ ID NO: 17508 - DNA, 20 bp, Artificial Sequence
  Description of Artificial Sequence: Synthetic oligonucleotide
  Target: ANGPTL4; (+) strand; PAM type: YTN; PAM sequence: CTG
gtctcaaactcctgaccgat

SEQ ID NO: 17509 - DNA, 20 bp, Artificial Sequence
  Description of Artificial Sequence: Synthetic oligonucleotide
  Target: ANGPTL4; (+) strand; PAM type: YTN; PAM sequence: CTC
aaactcctgaccgatccgcc

SEQ ID NO: 17510 - DNA, 20 bp, Artificial Sequence
  Description of Artificial Sequence: Synthetic oligonucleotide
  Target: ANGPTL4; (+) strand; PAM type: YTN; PAM sequence: CTC
ctgaccgatccgcccgcctc

SEQ ID NO: 17511 - DNA, 20 bp, Artificial Sequence
  Description of Artificial Sequence: Synthetic oligonucleotide
  Target: ANGPTL4; (+) strand; PAM type: YTN; PAM sequence: CTG
accgatccgcccgcctccca

SEQ ID NO: 17512 - DNA, 20 bp, Artificial Sequence
  Description of Artificial Sequence: Synthetic oligonucleotide
  Target: ANGPTL4; (+) strand; PAM type: YTN; PAM sequence: CTC
ccaaagtgctggattacagg

SEQ ID NO: 17513 - DNA, 20 bp, Artificial Sequence
  Description of Artificial Sequence: Synthetic oligonucleotide
  Target: ANGPTL4; (+) strand; PAM type: YTN; PAM sequence: CTG
gattacaggcatgaaccact

SEQ ID NO: 17514 - DNA, 20 bp, Artificial Sequence
  Description of Artificial Sequence: Synthetic oligonucleotide
  Target: ANGPTL4; (+) strand; PAM type: YTN; PAM sequence: TTA
caggcatgaaccactgcgcc

SEQ ID NO: 17515 - DNA, 20 bp, Artificial Sequence
  Description of Artificial Sequence: Synthetic oligonucleotide
  Target: ANGPTL4; (+) strand; PAM type: YTN; PAM sequence: CTG
cgcccggcccattcctcaag

SEQ ID NO: 17516 - DNA, 20 bp, Artificial Sequence
  Description of Artificial Sequence: Synthetic oligonucleotide
  Target: ANGPTL4; (+) strand; PAM type: YTN; PAM sequence: TTC
ctcaagtctttattgagcag

SEQ ID NO: 17517 - DNA, 20 bp, Artificial Sequence
  Description of Artificial Sequence: Synthetic oligonucleotide
  Target: ANGPTL4; (+) strand; PAM type: YTN; PAM sequence: CTC
aagtctttattgagcagctg

SEQ ID NO: 17518 - DNA, 20 bp, Artificial Sequence
  Description of Artificial Sequence: Synthetic oligonucleotide
  Target: ANGPTL4; (+) strand; PAM type: YTN; PAM sequence: CTT
tattgagcagctgctatgcg

SEQ ID NO: 17519 - DNA, 20 bp, Artificial Sequence
  Description of Artificial Sequence: Synthetic oligonucleotide
  Target: ANGPTL4; (+) strand; PAM type: YTN; PAM sequence: TTT
attgagcagctgctatgcgc

SEQ ID NO: 17520 - DNA, 20 bp, Artificial Sequence
  Description of Artificial Sequence: Synthetic oligonucleotide
  Target: ANGPTL4; (+) strand; PAM type: YTN; PAM sequence: TTA
ttgagcagctgctatgcgct

SEQ ID NO: 17521 - DNA, 20 bp, Artificial Sequence
  Description of Artificial Sequence: Synthetic oligonucleotide
  Target: ANGPTL4; (+) strand; PAM type: YTN; PAM sequence: TTG
agcagctgctatgcgctggg

SEQ ID NO: 17522 - DNA, 20 bp, Artificial Sequence
  Description of Artificial Sequence: Synthetic oligonucleotide
  Target: ANGPTL4; (+) strand; PAM type: YTN; PAM sequence: CTG
ctatgcgctggggcctgcgt

SEQ ID NO: 17523 - DNA, 20 bp, Artificial Sequence
  Description of Artificial Sequence: Synthetic oligonucleotide
  Target: ANGPTL4; (+) strand; PAM type: YTN; PAM sequence: CTA
tgcgctggggcctgcgtgga

SEQ ID NO: 17524 - DNA, 20 bp, Artificial Sequence
  Description of Artificial Sequence: Synthetic oligonucleotide
  Target: ANGPTL4; (+) strand; PAM type: YTN; PAM sequence: CTG
gggcctgcgtggatgctggt

SEQ ID NO: 17525 - DNA, 20 bp, Artificial Sequence
  Description of Artificial Sequence: Synthetic oligonucleotide
  Target: ANGPTL4; (+) strand; PAM type: YTN; PAM sequence: CTG
cgtggatgctggtgccaggc

SEQ ID NO: 17526 - DNA, 20 bp, Artificial Sequence
  Description of Artificial Sequence: Synthetic oligonucleotide
  Target: ANGPTL4; (+) strand; PAM type: YTN; PAM sequence: CTG
gtgccaggctgtgggcagag

SEQ ID NO: 17527 - DNA, 20 bp, Artificial Sequence
  Description of Artificial Sequence: Synthetic oligonucleotide
  Target: ANGPTL4; (+) strand; PAM type: YTN; PAM sequence: CTG
tgggcagagctgctccttgt

SEQ ID NO: 17528 - DNA, 20 bp, Artificial Sequence
  Description of Artificial Sequence: Synthetic oligonucleotide
  Target: ANGPTL4; (+) strand; PAM type: YTN; PAM sequence: CTG
ctccttgtccccagcctcat

SEQ ID NO: 17529 - DNA, 20 bp, Artificial Sequence
  Description of Artificial Sequence: Synthetic oligonucleotide
  Target: ANGPTL4; (+) strand; PAM type: YTN; PAM sequence: CTC
cttgtccccagcctcatgga

SEQ ID NO: 17530 - DNA, 20 bp, Artificial Sequence
  Description of Artificial Sequence: Synthetic oligonucleotide
  Target: ANGPTL4; (+) strand; PAM type: YTN; PAM sequence: CTT
gtccccagcctcatggagcc

SEQ ID NO: 17531 - DNA, 20 bp, Artificial Sequence
  Description of Artificial Sequence: Synthetic oligonucleotide
  Target: ANGPTL4; (+) strand; PAM type: YTN; PAM sequence: TTG
tccccagcctcatggagcct

SEQ ID NO: 17532 - DNA, 20 bp, Artificial Sequence
  Description of Artificial Sequence: Synthetic oligonucleotide
  Target: ANGPTL4; (+) strand; PAM type: YTN; PAM sequence: CTC
atggagcctccattgagtca

SEQ ID NO: 17533 - DNA, 20 bp, Artificial Sequence
  Description of Artificial Sequence: Synthetic oligonucleotide
  Target: ANGPTL4; (+) strand; PAM type: YTN; PAM sequence: CTC
cattgagtcagaggagagac

SEQ ID NO: 17534 - DNA, 20 bp, Artificial Sequence
  Description of Artificial Sequence: Synthetic oligonucleotide
  Target: ANGPTL4; (+) strand; PAM type: YTN; PAM sequence: TTG
agtcagaggagagaccatta

SEQ ID NO: 17535 - DNA, 20 bp, Artificial Sequence
  Description of Artificial Sequence: Synthetic oligonucleotide
  Target: ANGPTL4; (+) strand; PAM type: YTN; PAM sequence: TTA
gatgacctcagtgtccagga

SEQ ID NO: 17536 - DNA, 20 bp, Artificial Sequence
  Description of Artificial Sequence: Synthetic oligonucleotide
  Target: ANGPTL4; (+) strand; PAM type: YTN; PAM sequence: CTC
agtgtccaggagtgggaagt

SEQ ID NO: 17537 - DNA, 20 bp, Artificial Sequence
  Description of Artificial Sequence: Synthetic oligonucleotide
  Target: ANGPTL4; (+) strand; PAM type: YTN; PAM sequence: CTT
gctcaattcccatttggggt

SEQ ID NO: 17538 - DNA, 20 bp, Artificial Sequence
  Description of Artificial Sequence: Synthetic oligonucleotide
  Target: ANGPTL4; (+) strand; PAM type: YTN; PAM sequence: TTG
ctcaattcccatttggggtg

SEQ ID NO: 17539 - DNA, 20 bp, Artificial Sequence
  Description of Artificial Sequence: Synthetic oligonucleotide
  Target: ANGPTL4; (+) strand; PAM type: YTN; PAM sequence: CTC
aattcccatttggggtgttc

SEQ ID NO: 17540 - DNA, 20 bp, Artificial Sequence
  Description of Artificial Sequence: Synthetic oligonucleotide
  Target: ANGPTL4; (+) strand; PAM type: YTN; PAM sequence: TTC
ccatttggggtgttctggcc

SEQ ID NO: 17541 - DNA, 20 bp, Artificial Sequence
  Description of Artificial Sequence: Synthetic oligonucleotide
  Target: ANGPTL4; (+) strand; PAM type: YTN; PAM sequence: TTT
ggggtgttctggcctggtct

SEQ ID NO: 17542 - DNA, 20 bp, Artificial Sequence
  Description of Artificial Sequence: Synthetic oligonucleotide
  Target: ANGPTL4; (+) strand; PAM type: YTN; PAM sequence: TTG
gggtgttctggcctggtctg

SEQ ID NO: 17543 - DNA, 20 bp, Artificial Sequence
  Description of Artificial Sequence: Synthetic oligonucleotide
  Target: ANGPTL4; (+) strand; PAM type: YTN; PAM sequence: TTC
tggcctggtctgggggtgag

SEQ ID NO: 17544 - DNA, 20 bp, Artificial Sequence
  Description of Artificial Sequence: Synthetic oligonucleotide
  Target: ANGPTL4; (+) strand; PAM type: YTN; PAM sequence: CTG
gcctggtctgggggtgaggc

SEQ ID NO: 17545 - DNA, 20 bp, Artificial Sequence
  Description of Artificial Sequence: Synthetic oligonucleotide
  Target: ANGPTL4; (+) strand; PAM type: YTN; PAM sequence: CTG
gtctgggggtgaggcaaggc

SEQ ID NO: 17546 - DNA, 20 bp, Artificial Sequence
  Description of Artificial Sequence: Synthetic oligonucleotide
  Target: ANGPTL4; (+) strand; PAM type: YTN; PAM sequence: CTG
ggggtgaggcaaggcagggt

SEQ ID NO: 17547 - DNA, 20 bp, Artificial Sequence
  Description of Artificial Sequence: Synthetic oligonucleotide
  Target: ANGPTL4; (+) strand; PAM type: YTN; PAM sequence: CTT
ccagaagctgggacccagag

SEQ ID NO: 17548 - DNA, 20 bp, Artificial Sequence
  Description of Artificial Sequence: Synthetic oligonucleotide
  Target: ANGPTL4; (+) strand; PAM type: YTN; PAM sequence: TTC
cagaagctgggacccagaga

SEQ ID NO: 17549 - DNA, 20 bp, Artificial Sequence
  Description of Artificial Sequence: Synthetic oligonucleotide
  Target: ANGPTL4; (+) strand; PAM type: YTN; PAM sequence: CTG
ggacccagagagagaagtga

SEQ ID NO: 17550 - DNA, 20 bp, Artificial Sequence
  Description of Artificial Sequence: Synthetic oligonucleotide
  Target: ANGPTL4; (+) strand; PAM type: YTN; PAM sequence: TTC
acacctgtaatcccagcact

SEQ ID NO: 17551 - DNA, 20 bp, Artificial Sequence
  Description of Artificial Sequence: Synthetic oligonucleotide
  Target: ANGPTL4; (+) strand; PAM type: YTN; PAM sequence: CTG
taatcccagcactttgggag

SEQ ID NO: 17552 - DNA, 20 bp, Artificial Sequence
  Description of Artificial Sequence: Synthetic oligonucleotide
  Target: ANGPTL4; (+) strand; PAM type: YTN; PAM sequence: CTT
tgggaggccaaggctggcgg

SEQ ID NO: 17553 - DNA, 20 bp, Artificial Sequence
  Description of Artificial Sequence: Synthetic oligonucleotide
  Target: ANGPTL4; (+) strand; PAM type: YTN; PAM sequence: TTT
gggaggccaaggctggcgga

SEQ ID NO: 17554 - DNA, 20 bp, Artificial Sequence
  Description of Artificial Sequence: Synthetic oligonucleotide
  Target: ANGPTL4; (+) strand; PAM type: YTN; PAM sequence: TTG
ggaggccaaggctggcggat

SEQ ID NO: 17555 - DNA, 20 bp, Artificial Sequence
  Description of Artificial Sequence: Synthetic oligonucleotide
  Target: ANGPTL4; (+) strand; PAM type: YTN; PAM sequence: CTG
gcggatcacgaggtcaggag

SEQ ID NO: 17556 - DNA, 20 bp, Artificial Sequence
  Description of Artificial Sequence: Synthetic oligonucleotide
  Target: ANGPTL4; (+) strand; PAM type: YTN; PAM sequence: CTG
gccaacatggtgaaaccccc

SEQ ID NO: 17557 - DNA, 20 bp, Artificial Sequence
  Description of Artificial Sequence: Synthetic oligonucleotide
  Target: ANGPTL4; (+) strand; PAM type: YTN; PAM sequence: CTC
tacaaataatgcaaaaacta

SEQ ID NO: 17558 - DNA, 20 bp, Artificial Sequence
  Description of Artificial Sequence: Synthetic oligonucleotide
  Target: ANGPTL4; (+) strand; PAM type: YTN; PAM sequence: CTA
caaataatgcaaaaactagt

SEQ ID NO: 17559 - DNA, 20 bp, Artificial Sequence
  Description of Artificial Sequence: Synthetic oligonucleotide
  Target: ANGPTL4; (+) strand; PAM type: YTN; PAM sequence: CTA
gtcgggcgtggtggcacatg

SEQ ID NO: 17560 - DNA, 20 bp, Artificial Sequence
  Description of Artificial Sequence: Synthetic oligonucleotide
  Target: ANGPTL4; (+) strand; PAM type: YTN; PAM sequence: CTG
tagtcccagctgctccggag

SEQ ID NO: 17561 - DNA, 20 bp, Artificial Sequence
  Description of Artificial Sequence: Synthetic oligonucleotide
  Target: ANGPTL4; (+) strand; PAM type: YTN; PAM sequence: CTG
ctccggaggctgcggcagaa

SEQ ID NO: 17562 - DNA, 20 bp, Artificial Sequence
  Description of Artificial Sequence: Synthetic oligonucleotide
  Target: ANGPTL4; (+) strand; PAM type: YTN; PAM sequence: CTC
cggaggctgcggcagaattg

SEQ ID NO: 17563 - DNA, 20 bp, Artificial Sequence
  Description of Artificial Sequence: Synthetic oligonucleotide
  Target: ANGPTL4; (+) strand; PAM type: YTN; PAM sequence: CTG
cggcagaattgcttgaacct

SEQ ID NO: 17564 - DNA, 20 bp, Artificial Sequence
  Description of Artificial Sequence: Synthetic oligonucleotide
  Target: ANGPTL4; (+) strand; PAM type: YTN; PAM sequence: TTG
cttgaacctgggaggcggag

SEQ ID NO: 17565 - DNA, 20 bp, Artificial Sequence
  Description of Artificial Sequence: Synthetic oligonucleotide
  Target: ANGPTL4; (+) strand; PAM type: YTN; PAM sequence: CTT
gaacctgggaggcggaggtt

SEQ ID NO: 17566 - DNA, 20 bp, Artificial Sequence
  Description of Artificial Sequence: Synthetic oligonucleotide
  Target: ANGPTL4; (+) strand; PAM type: YTN; PAM sequence: TTG
aacctgggaggcggaggttg

SEQ ID NO: 17567 - DNA, 20 bp, Artificial Sequence
  Description of Artificial Sequence: Synthetic oligonucleotide
  Target: ANGPTL4; (+) strand; PAM type: YTN; PAM sequence: CTG
ggaggcggaggttgcagtga

SEQ ID NO: 17568 - DNA, 20 bp, Artificial Sequence
  Description of Artificial Sequence: Synthetic oligonucleotide
  Target: ANGPTL4; (+) strand; PAM type: YTN; PAM sequence: TTG
cagtgagccaagattgcgcc

SEQ ID NO: 17569 - DNA, 20 bp, Artificial Sequence
  Description of Artificial Sequence: Synthetic oligonucleotide
  Target: ANGPTL4; (+) strand; PAM type: YTN; PAM sequence: TTG
cgccactgcactccagcctg

SEQ ID NO: 17570 - DNA, 20 bp, Artificial Sequence
  Description of Artificial Sequence: Synthetic oligonucleotide
  Target: ANGPTL4; (+) strand; PAM type: YTN; PAM sequence: CTG
cactccagcctggcgacaga

SEQ ID NO: 17571 - DNA, 20 bp, Artificial Sequence
  Description of Artificial Sequence: Synthetic oligonucleotide
  Target: ANGPTL4; (+) strand; PAM type: YTN; PAM sequence: CTC
cagcctggcgacagagcgag

SEQ ID NO: 17572 - DNA, 20 bp, Artificial Sequence
  Description of Artificial Sequence: Synthetic oligonucleotide
  Target: ANGPTL4; (+) strand; PAM type: YTN; PAM sequence: CTG
gcgacagagcgagactccgt

SEQ ID NO: 17573 - DNA, 20 bp, Artificial Sequence
  Description of Artificial Sequence: Synthetic oligonucleotide
  Target: ANGPTL4; (+) strand; PAM type: YTN; PAM sequence: CTC
cgtatcaaaaaacaaaacaa

SEQ ID NO: 17574 - DNA, 20 bp, Artificial Sequence
  Description of Artificial Sequence: Synthetic oligonucleotide
  Target: ANGPTL4; (+) strand; PAM type: YTN; PAM sequence: CTG
tggcaggacggtgtgtggta

SEQ ID NO: 17575 - DNA, 20 bp, Artificial Sequence
  Description of Artificial Sequence: Synthetic oligonucleotide
  Target: ANGPTL4; (+) strand; PAM type: YTN; PAM sequence: CTG
tgtgccagagagggtgtggg

SEQ ID NO: 17576 - DNA, 20 bp, Artificial Sequence
  Description of Artificial Sequence: Synthetic oligonucleotide
  Target: ANGPTL4; (+) strand; PAM type: YTN; PAM sequence: CTG
gtcctccaggtgccttgtgg

SEQ ID NO: 17577 - DNA, 20 bp, Artificial Sequence
  Description of Artificial Sequence: Synthetic oligonucleotide
  Target: ANGPTL4; (+) strand; PAM type: YTN; PAM sequence: CTC
caggtgccttgtggaccatg

SEQ ID NO: 17578 - DNA, 20 bp, Artificial Sequence
  Description of Artificial Sequence: Synthetic oligonucleotide
  Target: ANGPTL4; (+) strand; PAM type: YTN; PAM sequence: CTT
gtggaccatgctgaggaagg

SEQ ID NO: 17579 - DNA, 20 bp, Artificial Sequence
  Description of Artificial Sequence: Synthetic oligonucleotide
  Target: ANGPTL4; (+) strand; PAM type: YTN; PAM sequence: TTG
tggaccatgctgaggaagga

SEQ ID NO: 17580 - DNA, 20 bp, Artificial Sequence
  Description of Artificial Sequence: Synthetic oligonucleotide
  Target: ANGPTL4; (+) strand; PAM type: YTN; PAM sequence: CTG
aggaaggacatagggagcca

SEQ ID NO: 17581 - DNA, 20 bp, Artificial Sequence
  Description of Artificial Sequence: Synthetic oligonucleotide
  Target: ANGPTL4; (+) strand; PAM type: YTN; PAM sequence: TTA
ggcagatggcagagaggtgg

SEQ ID NO: 17582 - DNA, 20 bp, Artificial Sequence
  Description of Artificial Sequence: Synthetic oligonucleotide
  Target: ANGPTL4; (+) strand; PAM type: YTN; PAM sequence: TTT
gccttttacttccctggtca

SEQ ID NO: 17583 - DNA, 20 bp, Artificial Sequence
  Description of Artificial Sequence: Synthetic oligonucleotide
  Target: ANGPTL4; (+) strand; PAM type: YTN; PAM sequence: TTG
ccttttacttccctggtcat

SEQ ID NO: 17584 - DNA, 20 bp, Artificial Sequence
  Description of Artificial Sequence: Synthetic oligonucleotide
  Target: ANGPTL4; (+) strand; PAM type: YTN; PAM sequence: CTT
ttacttccctggtcatccac

SEQ ID NO: 17585 - DNA, 20 bp, Artificial Sequence
  Description of Artificial Sequence: Synthetic oligonucleotide
  Target: ANGPTL4; (+) strand; PAM type: YTN; PAM sequence: TTT
tacttccctggtcatccact

SEQ ID NO: 17586 - DNA, 20 bp, Artificial Sequence
  Description of Artificial Sequence: Synthetic oligonucleotide
  Target: ANGPTL4; (+) strand; PAM type: YTN; PAM sequence: TTT
acttccctggtcatccactg

SEQ ID NO: 17587 - DNA, 20 bp, Artificial Sequence
  Description of Artificial Sequence: Synthetic oligonucleotide
  Target: ANGPTL4; (+) strand; PAM type: YTN; PAM sequence: TTA
cttccctggtcatccactgt

SEQ ID NO: 17588 - DNA, 20 bp, Artificial Sequence
  Description of Artificial Sequence: Synthetic oligonucleotide
  Target: ANGPTL4; (+) strand; PAM type: YTN; PAM sequence: CTT
ccctggtcatccactgttaa

SEQ ID NO: 17589 - DNA, 20 bp, Artificial Sequence
  Description of Artificial Sequence: Synthetic oligonucleotide
  Target: ANGPTL4; (+) strand; PAM type: YTN; PAM sequence: TTC
cctggtcatccactgttaag

SEQ ID NO: 17590 - DNA, 20 bp, Artificial Sequence
  Description of Artificial Sequence: Synthetic oligonucleotide
  Target: ANGPTL4; (+) strand; PAM type: YTN; PAM sequence: CTG
gtcatccactgttaagcccc

SEQ ID NO: 17591 - DNA, 20 bp, Artificial Sequence
  Description of Artificial Sequence: Synthetic oligonucleotide
  Target: ANGPTL4; (+) strand; PAM type: YTN; PAM sequence: CTG
ttaagcccccagatatgcct

SEQ ID NO: 17592 - DNA, 20 bp, Artificial Sequence
  Description of Artificial Sequence: Synthetic oligonucleotide
  Target: ANGPTL4; (+) strand; PAM type: YTN; PAM sequence: TTA
agcccccagatatgcctggc

SEQ ID NO: 17593 - DNA, 20 bp, Artificial Sequence
  Description of Artificial Sequence: Synthetic oligonucleotide
  Target: ANGPTL4; (+) strand; PAM type: YTN; PAM sequence: CTG
gctcctgagaccccccccag

SEQ ID NO: 17594 - DNA, 20 bp, Artificial Sequence
  Description of Artificial Sequence: Synthetic oligonucleotide
  Target: ANGPTL4; (+) strand; PAM type: YTN; PAM sequence: CTC
ctgagaccccccccaggggc

SEQ ID NO: 17595 - DNA, 20 bp, Artificial Sequence
  Description of Artificial Sequence: Synthetic oligonucleotide
  Target: ANGPTL4; (+) strand; PAM type: YTN; PAM sequence: CTG
agaccccccccaggggctgc

SEQ ID NO: 17596 - DNA, 20 bp, Artificial Sequence
  Description of Artificial Sequence: Synthetic oligonucleotide
  Target: ANGPTL4; (+) strand; PAM type: YTN; PAM sequence: CTG
ccctcctgtttcaagtctcc

SEQ ID NO: 17597 - DNA, 20 bp, Artificial Sequence
  Description of Artificial Sequence: Synthetic oligonucleotide
  Target: ANGPTL4; (+) strand; PAM type: YTN; PAM sequence: CTC
ctgtttcaagtctccacttt

SEQ ID NO: 17598 - DNA, 20 bp, Artificial Sequence
  Description of Artificial Sequence: Synthetic oligonucleotide
  Target: ANGPTL4; (+) strand; PAM type: YTN; PAM sequence: CTG
tttcaagtctccactttatc

SEQ ID NO: 17599 - DNA, 20 bp, Artificial Sequence
  Description of Artificial Sequence: Synthetic oligonucleotide
  Target: ANGPTL4; (+) strand; PAM type: YTN; PAM sequence: TTT
caagtctccactttatctcc

SEQ ID NO: 17600 - DNA, 20 bp, Artificial Sequence
  Description of Artificial Sequence: Synthetic oligonucleotide
  Target: ANGPTL4; (+) strand; PAM type: YTN; PAM sequence: TTC
aagtctccactttatctccc

SEQ ID NO: 17601 - DNA, 20 bp, Artificial Sequence
  Description of Artificial Sequence: Synthetic oligonucleotide
  Target: ANGPTL4; (+) strand; PAM type: YTN; PAM sequence: CTC
cactttatctcccttcaggg

SEQ ID NO: 17602 - DNA, 20 bp, Artificial Sequence
  Description of Artificial Sequence: Synthetic oligonucleotide
  Target: ANGPTL4; (+) strand; PAM type: YTN; PAM sequence: CTT
tatctcccttcagggctgcc

SEQ ID NO: 17603 - DNA, 20 bp, Artificial Sequence
  Description of Artificial Sequence: Synthetic oligonucleotide
  Target: ANGPTL4; (+) strand; PAM type: YTN; PAM sequence: TTT
atctcccttcagggctgccc

SEQ ID NO: 17604 - DNA, 20 bp, Artificial Sequence
  Description of Artificial Sequence: Synthetic oligonucleotide
  Target: ANGPTL4; (+) strand; PAM type: YTN; PAM sequence: TTA
tctcccttcagggctgccca

SEQ ID NO: 17605 - DNA, 20 bp, Artificial Sequence
  Description of Artificial Sequence: Synthetic oligonucleotide
  Target: ANGPTL4; (+) strand; PAM type: YTN; PAM sequence: CTC
ccttcagggctgcccaggga

SEQ ID NO: 17606 - DNA, 20 bp, Artificial Sequence
  Description of Artificial Sequence: Synthetic oligonucleotide
  Target: ANGPTL4; (+) strand; PAM type: YTN; PAM sequence: CTT
cagggctgcccagggattgc

SEQ ID NO: 17607 - DNA, 20 bp, Artificial Sequence
  Description of Artificial Sequence: Synthetic oligonucleotide
  Target: ANGPTL4; (+) strand; PAM type: YTN; PAM sequence: TTC
agggctgcccagggattgcc

SEQ ID NO: 17608 - DNA, 20 bp, Artificial Sequence
  Description of Artificial Sequence: Synthetic oligonucleotide
  Target: ANGPTL4; (+) strand; PAM type: YTN; PAM sequence: CTG
cccagggattgccaggagct

SEQ ID NO: 17609 - DNA, 20 bp, Artificial Sequence
  Description of Artificial Sequence: Synthetic oligonucleotide
  Target: ANGPTL4; (+) strand; PAM type: YTN; PAM sequence: TTG
ccaggagctgttccaggttg

SEQ ID NO: 17610 - DNA, 20 bp, Artificial Sequence
  Description of Artificial Sequence: Synthetic oligonucleotide
  Target: ANGPTL4; (+) strand; PAM type: YTN; PAM sequence: CTG
ttccaggttggggagaggca

SEQ ID NO: 17611 - DNA, 20 bp, Artificial Sequence
  Description of Artificial Sequence: Synthetic oligonucleotide
  Target: ANGPTL4; (+) strand; PAM type: YTN; PAM sequence: TTC
caggttggggagaggcagag

SEQ ID NO: 17612 - DNA, 20 bp, Artificial Sequence
  Description of Artificial Sequence: Synthetic oligonucleotide
  Target: ANGPTL4; (+) strand; PAM type: YTN; PAM sequence: TTG
gggagaggcagagtggacta

SEQ ID NO: 17613 - DNA, 20 bp, Artificial Sequence
  Description of Artificial Sequence: Synthetic oligonucleotide
  Target: ANGPTL4; (+) strand; PAM type: YTN; PAM sequence: CTA
tttgaaatccagcctcaggg

SEQ ID NO: 17614 - DNA, 20 bp, Artificial Sequence
  Description of Artificial Sequence: Synthetic oligonucleotide
  Target: ANGPTL4; (+) strand; PAM type: YTN; PAM sequence: TTT
gaaatccagcctcaggggtc

SEQ ID NO: 17615 - DNA, 20 bp, Artificial Sequence
  Description of Artificial Sequence: Synthetic oligonucleotide
  Target: ANGPTL4; (+) strand; PAM type: YTN; PAM sequence: TTG
aaatccagcctcaggggtct

SEQ ID NO: 17616 - DNA, 20 bp, Artificial Sequence
  Description of Artificial Sequence: Synthetic oligonucleotide
  Target: ANGPTL4; (+) strand; PAM type: YTN; PAM sequence: CTC
aggggtctccgccatttttg

SEQ ID NO: 17617 - DNA, 20 bp, Artificial Sequence
  Description of Artificial Sequence: Synthetic oligonucleotide
  Target: ANGPTL4; (+) strand; PAM type: YTN; PAM sequence: CTC
cgccatttttggtgaactgc

SEQ ID NO: 17618 - DNA, 20 bp, Artificial Sequence
  Description of Artificial Sequence: Synthetic oligonucleotide
  Target: ANGPTL4; (+) strand; PAM type: YTN; PAM sequence: TTT
ttggtgaactgcaagatgac

SEQ ID NO: 17619 - DNA, 20 bp, Artificial Sequence
  Description of Artificial Sequence: Synthetic oligonucleotide
  Target: ANGPTL4; (+) strand; PAM type: YTN; PAM sequence: TTT
tggtgaactgcaagatgacc

SEQ ID NO: 17620 - DNA, 20 bp, Artificial Sequence
  Description of Artificial Sequence: Synthetic oligonucleotide
  Target: ANGPTL4; (+) strand; PAM type: YTN; PAM sequence: TTT
ggtgaactgcaagatgacct

SEQ ID NO: 17621 - DNA, 20 bp, Artificial Sequence
  Description of Artificial Sequence: Synthetic oligonucleotide
  Target: ANGPTL4; (+) strand; PAM type: YTN; PAM sequence: TTG
gtgaactgcaagatgacctc

SEQ ID NO: 17622 - DNA, 20 bp, Artificial Sequence
  Description of Artificial Sequence: Synthetic oligonucleotide
  Target: ANGPTL4; (+) strand; PAM type: YTN; PAM sequence: CTG
caagatgacctcaggtaggg

SEQ ID NO: 17623 - DNA, 20 bp, Artificial Sequence
  Description of Artificial Sequence: Synthetic oligonucleotide
  Target: ANGPTL4; (+) strand; PAM type: YTN; PAM sequence: CTC
aggtagggtgtgttagtcca

SEQ ID NO: 17624 - DNA, 20 bp, Artificial Sequence
  Description of Artificial Sequence: Synthetic oligonucleotide
  Target: ANGPTL4; (+) strand; PAM type: YTN; PAM sequence: TTA
gtccaccaggggcccctctc

SEQ ID NO: 17625 - DNA, 20 bp, Artificial Sequence
  Description of Artificial Sequence: Synthetic oligonucleotide
  Target: ANGPTL4; (+) strand; PAM type: YTN; PAM sequence: CTC
tccccataggccctgttgtc

SEQ ID NO: 17626 - DNA, 20 bp, Artificial Sequence
  Description of Artificial Sequence: Synthetic oligonucleotide
  Target: ANGPTL4; (+) strand; PAM type: YTN; PAM sequence: CTC
cccataggccctgttgtctt

SEQ ID NO: 17627 - DNA, 20 bp, Artificial Sequence
  Description of Artificial Sequence: Synthetic oligonucleotide
  Target: ANGPTL4; (+) strand; PAM type: YTN; PAM sequence: CTG
ttgtctttctttaaattgaa

SEQ ID NO: 17628 - DNA, 20 bp, Artificial Sequence
  Description of Artificial Sequence: Synthetic oligonucleotide
  Target: ANGPTL4; (+) strand; PAM type: YTN; PAM sequence: TTG
tctttctttaaattgaaaac

SEQ ID NO: 17629 - DNA, 20 bp, Artificial Sequence
  Description of Artificial Sequence: Synthetic oligonucleotide
  Target: ANGPTL4; (+) strand; PAM type: YTN; PAM sequence: CTT
tctttaaattgaaaacaaaa

SEQ ID NO: 17630 - DNA, 20 bp, Artificial Sequence
  Description of Artificial Sequence: Synthetic oligonucleotide
  Target: ANGPTL4; (+) strand; PAM type: YTN; PAM sequence: TTT
ctttaaattgaaaacaaaac

SEQ ID NO: 17631 - DNA, 20 bp, Artificial Sequence
  Description of Artificial Sequence: Synthetic oligonucleotide
  Target: ANGPTL4; (+) strand; PAM type: YTN; PAM sequence: TTC
tttaaattgaaaacaaaaca

SEQ ID NO: 17632 - DNA, 20 bp, Artificial Sequence
  Description of Artificial Sequence: Synthetic oligonucleotide
  Target: ANGPTL4; (+) strand; PAM type: YTN; PAM sequence: CTT
taaattgaaaacaaaacaaa

SEQ ID NO: 17633 - DNA, 20 bp, Artificial Sequence
  Description of Artificial Sequence: Synthetic oligonucleotide
  Target: ANGPTL4; (+) strand; PAM type: YTN; PAM sequence: TTT
aaattgaaaacaaaacaaaa

SEQ ID NO: 17634 - DNA, 20 bp, Artificial Sequence
  Description of Artificial Sequence: Synthetic oligonucleotide
  Target: ANGPTL4; (+) strand; PAM type: YTN; PAM sequence: TTA
aattgaaaacaaaacaaaac

SEQ ID NO: 17635 - DNA, 20 bp, Artificial Sequence
  Description of Artificial Sequence: Synthetic oligonucleotide
  Target: ANGPTL4; (+) strand; PAM type: YTN; PAM sequence: TTG
aaaacaaaacaaaacaaaaa

SEQ ID NO: 17636 - DNA, 20 bp, Artificial Sequence
  Description of Artificial Sequence: Synthetic oligonucleotide
  Target: ANGPTL4; (+) strand; PAM type: YTN; PAM sequence: TTA
aaggcagggtcttgctatgt

SEQ ID NO: 17637 - DNA, 20 bp, Artificial Sequence
  Description of Artificial Sequence: Synthetic oligonucleotide
  Target: ANGPTL4; (+) strand; PAM type: YTN; PAM sequence: CTT
gctatgttgcccaagctggt

SEQ ID NO: 17638 - DNA, 20 bp, Artificial Sequence
  Description of Artificial Sequence: Synthetic oligonucleotide
  Target: ANGPTL4; (+) strand; PAM type: YTN; PAM sequence: TTG
ctatgttgcccaagctggtc

SEQ ID NO: 17639 - DNA, 20 bp, Artificial Sequence
  Description of Artificial Sequence: Synthetic oligonucleotide
  Target: ANGPTL4; (+) strand; PAM type: YTN; PAM sequence: CTA
tgttgcccaagctggtcttt

SEQ ID NO: 17640 - DNA, 20 bp, Artificial Sequence
  Description of Artificial Sequence: Synthetic oligonucleotide
  Target: ANGPTL4; (+) strand; PAM type: YTN; PAM sequence: TTG
cccaagctggtctttttttt

SEQ ID NO: 17641 - DNA, 20 bp, Artificial Sequence
  Description of Artificial Sequence: Synthetic oligonucleotide
  Target: ANGPTL4; (+) strand; PAM type: YTN; PAM sequence: CTG
gtcttttttttttttttttt

SEQ ID NO: 17642 - DNA, 20 bp, Artificial Sequence
  Description of Artificial Sequence: Synthetic oligonucleotide
  Target: ANGPTL4; (+) strand; PAM type: YTN; PAM sequence: CTT
tttttttttttttttttttg

SEQ ID NO: 17643 - DNA, 20 bp, Artificial Sequence
  Description of Artificial Sequence: Synthetic oligonucleotide
  Target: ANGPTL4; (+) strand; PAM type: YTN; PAM sequence: TTT
ttttttttttttttttttga

SEQ ID NO: 17644 - DNA, 20 bp, Artificial Sequence
  Description of Artificial Sequence: Synthetic oligonucleotide
  Target: ANGPTL4; (+) strand; PAM type: YTN; PAM sequence: TTT
tttttttttttttttttgag

SEQ ID NO: 17645 - DNA, 20 bp, Artificial Sequence
  Description of Artificial Sequence: Synthetic oligonucleotide
  Target: ANGPTL4; (+) strand; PAM type: YTN; PAM sequence: TTT
ttttttttttttttttgaga

SEQ ID NO: 17646 - DNA, 20 bp, Artificial Sequence
  Description of Artificial Sequence: Synthetic oligonucleotide
  Target: ANGPTL4; (+) strand; PAM type: YTN; PAM sequence: TTT
tttttttttttttttgagat

SEQ ID NO: 17647 - DNA, 20 bp, Artificial Sequence
  Description of Artificial Sequence: Synthetic oligonucleotide
  Target: ANGPTL4; (+) strand; PAM type: YTN; PAM sequence: TTT
ttttttttttttttgagatg

SEQ ID NO: 17648 - DNA, 20 bp, Artificial Sequence
  Description of Artificial Sequence: Synthetic oligonucleotide
  Target: ANGPTL4; (+) strand; PAM type: YTN; PAM sequence: TTT
tttttttttttttgagatgg

SEQ ID NO: 17649 - DNA, 20 bp, Artificial Sequence
  Description of Artificial Sequence: Synthetic oligonucleotide
  Target: ANGPTL4; (+) strand; PAM type: YTN; PAM sequence: TTT
ttttttttttttgagatgga

SEQ ID NO: 17650 - DNA, 20 bp, Artificial Sequence
  Description of Artificial Sequence: Synthetic oligonucleotide
  Target: ANGPTL4; (+) strand; PAM type: YTN; PAM sequence: TTT
tttttttttttgagatggag

SEQ ID NO: 17651 - DNA, 20 bp, Artificial Sequence
  Description of Artificial Sequence: Synthetic oligonucleotide
  Target: ANGPTL4; (+) strand; PAM type: YTN; PAM sequence: TTT
ttttttttttgagatggagt

SEQ ID NO: 17652 - DNA, 20 bp, Artificial Sequence
  Description of Artificial Sequence: Synthetic oligonucleotide
  Target: ANGPTL4; (+) strand; PAM type: YTN; PAM sequence: TTT
tttttttttgagatggagtt

SEQ ID NO: 17653 - DNA, 20 bp, Artificial Sequence
  Description of Artificial Sequence: Synthetic oligonucleotide
  Target: ANGPTL4; (+) strand; PAM type: YTN; PAM sequence: TTT
ttttttttgagatggagttt

SEQ ID NO: 17654 - DNA, 20 bp, Artificial Sequence
  Description of Artificial Sequence: Synthetic oligonucleotide
  Target: ANGPTL4; (+) strand; PAM type: YTN; PAM sequence: TTT
tttttttgagatggagtttt

SEQ ID NO: 17655 - DNA, 20 bp, Artificial Sequence
  Description of Artificial Sequence: Synthetic oligonucleotide
  Target: ANGPTL4; (+) strand; PAM type: YTN; PAM sequence: TTT
ttttttgagatggagttttg

SEQ ID NO: 17656 - DNA, 20 bp, Artificial Sequence
  Description of Artificial Sequence: Synthetic oligonucleotide
  Target: ANGPTL4; (+) strand; PAM type: YTN; PAM sequence: TTT
tttttgagatggagttttgc

SEQ ID NO: 17657 - DNA, 20 bp, Artificial Sequence
  Description of Artificial Sequence: Synthetic oligonucleotide
  Target: ANGPTL4; (+) strand; PAM type: YTN; PAM sequence: TTT
ttttgagatggagttttgct

SEQ ID NO: 17658 - DNA, 20 bp, Artificial Sequence
  Description of Artificial Sequence: Synthetic oligonucleotide
  Target: ANGPTL4; (+) strand; PAM type: YTN; PAM sequence: TTT
tttgagatggagttttgctc

SEQ ID NO: 17659 - DNA, 20 bp, Artificial Sequence
  Description of Artificial Sequence: Synthetic oligonucleotide
  Target: ANGPTL4; (+) strand; PAM type: YTN; PAM sequence: TTT
ttgagatggagttttgctct

SEQ ID NO: 17660 - DNA, 20 bp, Artificial Sequence
  Description of Artificial Sequence: Synthetic oligonucleotide
  Target: ANGPTL4; (+) strand; PAM type: YTN; PAM sequence: TTT
tgagatggagttttgctctt

SEQ ID NO: 17661 - DNA, 20 bp, Artificial Sequence
  Description of Artificial Sequence: Synthetic oligonucleotide
  Target: ANGPTL4; (+) strand; PAM type: YTN; PAM sequence: TTT
gagatggagttttgctcttg

SEQ ID NO: 17662 - DNA, 20 bp, Artificial Sequence
  Description of Artificial Sequence: Synthetic oligonucleotide
  Target: ANGPTL4; (+) strand; PAM type: YTN; PAM sequence: TTG
agatggagttttgctcttgg

SEQ ID NO: 17663 - DNA, 20 bp, Artificial Sequence
  Description of Artificial Sequence: Synthetic oligonucleotide
  Target: ANGPTL4; (+) strand; PAM type: YTN; PAM sequence: TTT
tgctcttggagctggagtgc

SEQ ID NO: 17664 - DNA, 20 bp, Artificial Sequence
  Description of Artificial Sequence: Synthetic oligonucleotide
  Target: ANGPTL4; (+) strand; PAM type: YTN; PAM sequence: TTT
gctcttggagctggagtgca

SEQ ID NO: 17665 - DNA, 20 bp, Artificial Sequence
  Description of Artificial Sequence: Synthetic oligonucleotide
  Target: ANGPTL4; (+) strand; PAM type: YTN; PAM sequence: TTG
ctcttggagctggagtgcaa

SEQ ID NO: 17666 - DNA, 20 bp, Artificial Sequence
  Description of Artificial Sequence: Synthetic oligonucleotide
  Target: ANGPTL4; (+) strand; PAM type: YTN; PAM sequence: CTC
ttggagctggagtgcaatgc

SEQ ID NO: 17667 - DNA, 20 bp, Artificial Sequence
  Description of Artificial Sequence: Synthetic oligonucleotide
  Target: ANGPTL4; (+) strand; PAM type: YTN; PAM sequence: CTT
ggagctggagtgcaatgcca

SEQ ID NO: 17668 - DNA, 20 bp, Artificial Sequence
  Description of Artificial Sequence: Synthetic oligonucleotide
  Target: ANGPTL4; (+) strand; PAM type: YTN; PAM sequence: TTG
gagctggagtgcaatgccac

SEQ ID NO: 17669 - DNA, 20 bp, Artificial Sequence
  Description of Artificial Sequence: Synthetic oligonucleotide
  Target: ANGPTL4; (+) strand; PAM type: YTN; PAM sequence: CTG
gagtgcaatgccacgatctc

SEQ ID NO: 17670 - DNA, 20 bp, Artificial Sequence
  Description of Artificial Sequence: Synthetic oligonucleotide
  Target: ANGPTL4; (+) strand; PAM type: YTN; PAM sequence: CTC
agctcactgaaacctccgcc

SEQ ID NO: 17671 - DNA, 20 bp, Artificial Sequence
  Description of Artificial Sequence: Synthetic oligonucleotide
  Target: ANGPTL4; (+) strand; PAM type: YTN; PAM sequence: CTC
actgaaacctccgcctcccg

SEQ ID NO: 17672 - DNA, 20 bp, Artificial Sequence
  Description of Artificial Sequence: Synthetic oligonucleotide
  Target: ANGPTL4; (+) strand; PAM type: YTN; PAM sequence: CTG
aaacctccgcctcccgggtt

SEQ ID NO: 17673 - DNA, 20 bp, Artificial Sequence
  Description of Artificial Sequence: Synthetic oligonucleotide
  Target: ANGPTL4; (+) strand; PAM type: YTN; PAM sequence: CTC
cgcctcccgggttcaagcaa

SEQ ID NO: 17674 - DNA, 20 bp, Artificial Sequence
  Description of Artificial Sequence: Synthetic oligonucleotide
  Target: ANGPTL4; (+) strand; PAM type: YTN; PAM sequence: CTC
ccgggttcaagcaattctcc

SEQ ID NO: 17675 - DNA, 20 bp, Artificial Sequence
  Description of Artificial Sequence: Synthetic oligonucleotide
  Target: ANGPTL4; (+) strand; PAM type: YTN; PAM sequence: TTC
aagcaattctccagcgtcag

SEQ ID NO: 17676 - DNA, 20 bp, Artificial Sequence
  Description of Artificial Sequence: Synthetic oligonucleotide
  Target: ANGPTL4; (+) strand; PAM type: YTN; PAM sequence: TTC
tccagcgtcagcctccccag

SEQ ID NO: 17677 - DNA, 20 bp, Artificial Sequence
  Description of Artificial Sequence: Synthetic oligonucleotide
  Target: ANGPTL4; (+) strand; PAM type: YTN; PAM sequence: CTC
cagcgtcagcctccccagta

SEQ ID NO: 17678 - DNA, 20 bp, Artificial Sequence
  Description of Artificial Sequence: Synthetic oligonucleotide
  Target: ANGPTL4; (+) strand; PAM type: YTN; PAM sequence: CTC
cccagtagctgagactacag

SEQ ID NO: 17679 - DNA, 20 bp, Artificial Sequence
  Description of Artificial Sequence: Synthetic oligonucleotide
  Target: ANGPTL4; (+) strand; PAM type: YTN; PAM sequence: CTG
agactacaggtgcgagcaac

SEQ ID NO: 17680 - DNA, 20 bp, Artificial Sequence
  Description of Artificial Sequence: Synthetic oligonucleotide
  Target: ANGPTL4; (+) strand; PAM type: YTN; PAM sequence: CTA
caggtgcgagcaaccacacc

SEQ ID NO: 17681 - DNA, 20 bp, Artificial Sequence
  Description of Artificial Sequence: Synthetic oligonucleotide
  Target: ANGPTL4; (+) strand; PAM type: YTN; PAM sequence: CTA
atttttgtatttttagtaga

SEQ ID NO: 17682 - DNA, 20 bp, Artificial Sequence
  Description of Artificial Sequence: Synthetic oligonucleotide
  Target: ANGPTL4; (+) strand; PAM type: YTN; PAM sequence: TTT
ttgtatttttagtagagact

SEQ ID NO: 17683 - DNA, 20 bp, Artificial Sequence
  Description of Artificial Sequence: Synthetic oligonucleotide
  Target: ANGPTL4; (+) strand; PAM type: YTN; PAM sequence: TTT
tgtatttttagtagagactg

SEQ ID NO: 17684 - DNA, 20 bp, Artificial Sequence
  Description of Artificial Sequence: Synthetic oligonucleotide
  Target: ANGPTL4; (+) strand; PAM type: YTN; PAM sequence: TTT
gtatttttagtagagactgg

SEQ ID NO: 17685 - DNA, 20 bp, Artificial Sequence
  Description of Artificial Sequence: Synthetic oligonucleotide
  Target: ANGPTL4; (+) strand; PAM type: YTN; PAM sequence: TTG
tatttttagtagagactggg

SEQ ID NO: 17686 - DNA, 20 bp, Artificial Sequence
  Description of Artificial Sequence: Synthetic oligonucleotide
  Target: ANGPTL4; (+) strand; PAM type: YTN; PAM sequence: TTT
ttagtagagactgggtttca

SEQ ID NO: 17687 - DNA, 20 bp, Artificial Sequence
  Description of Artificial Sequence: Synthetic oligonucleotide
  Target: ANGPTL4; (+) strand; PAM type: YTN; PAM sequence: TTT
tagtagagactgggtttcac

SEQ ID NO: 17688 - DNA, 20 bp, Artificial Sequence
  Description of Artificial Sequence: Synthetic oligonucleotide
  Target: ANGPTL4; (+) strand; PAM type: YTN; PAM sequence: TTT
agtagagactgggtttcacc

SEQ ID NO: 17689 - DNA, 20 bp, Artificial Sequence
  Description of Artificial Sequence: Synthetic oligonucleotide
  Target: ANGPTL4; (+) strand; PAM type: YTN; PAM sequence: TTA
gtagagactgggtttcacca

SEQ ID NO: 17690 - DNA, 20 bp, Artificial Sequence
  Description of Artificial Sequence: Synthetic oligonucleotide
  Target: ANGPTL4; (+) strand; PAM type: YTN; PAM sequence: CTG
ggtttcaccatgttggtctg

SEQ ID NO: 17691 - DNA, 20 bp, Artificial Sequence
  Description of Artificial Sequence: Synthetic oligonucleotide
  Target: ANGPTL4; (+) strand; PAM type: YTN; PAM sequence: TTT
caccatgttggtctggctgg

SEQ ID NO: 17692 - DNA, 20 bp, Artificial Sequence
  Description of Artificial Sequence: Synthetic oligonucleotide
  Target: ANGPTL4; (+) strand; PAM type: YTN; PAM sequence: TTC
accatgttggtctggctggt

SEQ ID NO: 17693 - DNA, 20 bp, Artificial Sequence
  Description of Artificial Sequence: Synthetic oligonucleotide
  Target: ANGPTL4; (+) strand; PAM type: YTN; PAM sequence: TTG
gtctggctggtctcaaactc

SEQ ID NO: 17694 - DNA, 20 bp, Artificial Sequence
  Description of Artificial Sequence: Synthetic oligonucleotide
  Target: ANGPTL4; (+) strand; PAM type: YTN; PAM sequence: CTG
gctggtctcaaactcctgac

SEQ ID NO: 17695 - DNA, 20 bp, Artificial Sequence
  Description of Artificial Sequence: Synthetic oligonucleotide
  Target: ANGPTL4; (+) strand; PAM type: YTN; PAM sequence: CTG
gtctcaaactcctgacctca

SEQ ID NO: 17696 - DNA, 20 bp, Artificial Sequence
  Description of Artificial Sequence: Synthetic oligonucleotide
  Target: ANGPTL4; (+) strand; PAM type: YTN; PAM sequence: CTC
aaactcctgacctcaaatga

SEQ ID NO: 17697 - DNA, 20 bp, Artificial Sequence
  Description of Artificial Sequence: Synthetic oligonucleotide
  Target: ANGPTL4; (+) strand; PAM type: YTN; PAM sequence: CTC
ctgacctcaaatgatttgcc

SEQ ID NO: 17698 - DNA, 20 bp, Artificial Sequence
  Description of Artificial Sequence: Synthetic oligonucleotide
  Target: ANGPTL4; (+) strand; PAM type: YTN; PAM sequence: CTG
acctcaaatgatttgccgac

SEQ ID NO: 17699 - DNA, 20 bp, Artificial Sequence
  Description of Artificial Sequence: Synthetic oligonucleotide
  Target: ANGPTL4; (+) strand; PAM type: YTN; PAM sequence: CTC
aaatgatttgccgactttgg

SEQ ID NO: 17700 - DNA, 20 bp, Artificial Sequence
  Description of Artificial Sequence: Synthetic oligonucleotide
  Target: ANGPTL4; (+) strand; PAM type: YTN; PAM sequence: TTT
gccgactttggcctcccaaa

SEQ ID NO: 17701 - DNA, 20 bp, Artificial Sequence
  Description of Artificial Sequence: Synthetic oligonucleotide
  Target: ANGPTL4; (+) strand; PAM type: YTN; PAM sequence: TTG
ccgactttggcctcccaaaa

SEQ ID NO: 17702 - DNA, 20 bp, Artificial Sequence
  Description of Artificial Sequence: Synthetic oligonucleotide
  Target: ANGPTL4; (+) strand; PAM type: YTN; PAM sequence: CTT
tggcctcccaaaatgctggg

SEQ ID NO: 17703 - DNA, 20 bp, Artificial Sequence
  Description of Artificial Sequence: Synthetic oligonucleotide
  Target: ANGPTL4; (+) strand; PAM type: YTN; PAM sequence: TTT
ggcctcccaaaatgctggga

SEQ ID NO: 17704 - DNA, 20 bp, Artificial Sequence
  Description of Artificial Sequence: Synthetic oligonucleotide
  Target: ANGPTL4; (+) strand; PAM type: YTN; PAM sequence: TTG
gcctcccaaaatgctgggat

SEQ ID NO: 17705 - DNA, 20 bp, Artificial Sequence
  Description of Artificial Sequence: Synthetic oligonucleotide
  Target: ANGPTL4; (+) strand; PAM type: YTN; PAM sequence: CTC
ccaaaatgctgggattatag

SEQ ID NO: 17706 - DNA, 20 bp, Artificial Sequence
  Description of Artificial Sequence: Synthetic oligonucleotide
  Target: ANGPTL4; (+) strand; PAM type: YTN; PAM sequence: CTG
ggattataggcattagccac

SEQ ID NO: 17707 - DNA, 20 bp, Artificial Sequence
  Description of Artificial Sequence: Synthetic oligonucleotide
  Target: ANGPTL4; (+) strand; PAM type: YTN; PAM sequence: TTA
taggcattagccactgctcc

SEQ ID NO: 17708 - DNA, 20 bp, Artificial Sequence
  Description of Artificial Sequence: Synthetic oligonucleotide
  Target: ANGPTL4; (+) strand; PAM type: YTN; PAM sequence: TTA
gccactgctcctggcctctt

SEQ ID NO: 17709 - DNA, 20 bp, Artificial Sequence
  Description of Artificial Sequence: Synthetic oligonucleotide
  Target: ANGPTL4; (+) strand; PAM type: YTN; PAM sequence: CTG
ctcctggcctcttttcttta

SEQ ID NO: 17710 - DNA, 20 bp, Artificial Sequence
  Description of Artificial Sequence: Synthetic oligonucleotide
  Target: ANGPTL4; (+) strand; PAM type: YTN; PAM sequence: CTC
ctggcctcttttctttaaaa

SEQ ID NO: 17711 - DNA, 20 bp, Artificial Sequence
  Description of Artificial Sequence: Synthetic oligonucleotide
  Target: ANGPTL4; (+) strand; PAM type: YTN; PAM sequence: CTG
gcctcttttctttaaaatgc

SEQ ID NO: 17712 - DNA, 20 bp, Artificial Sequence
  Description of Artificial Sequence: Synthetic oligonucleotide
  Target: ANGPTL4; (+) strand; PAM type: YTN; PAM sequence: CTC
ttttctttaaaatgcagccc

SEQ ID NO: 17713 - DNA, 20 bp, Artificial Sequence
  Description of Artificial Sequence: Synthetic oligonucleotide
  Target: ANGPTL4; (+) strand; PAM type: YTN; PAM sequence: CTT
ttctttaaaatgcagccctt

SEQ ID NO: 17714 - DNA, 20 bp, Artificial Sequence
  Description of Artificial Sequence: Synthetic oligonucleotide
  Target: ANGPTL4; (+) strand; PAM type: YTN; PAM sequence: TTT
tctttaaaatgcagcccttg

SEQ ID NO: 17715 - DNA, 20 bp, Artificial Sequence
  Description of Artificial Sequence: Synthetic oligonucleotide
  Target: ANGPTL4; (+) strand; PAM type: YTN; PAM sequence: TTT
ctttaaaatgcagcccttgt

SEQ ID NO: 17716 - DNA, 20 bp, Artificial Sequence
  Description of Artificial Sequence: Synthetic oligonucleotide
  Target: ANGPTL4; (+) strand; PAM type: YTN; PAM sequence: TTC
tttaaaatgcagcccttgtc

SEQ ID NO: 17717 - DNA, 20 bp, Artificial Sequence
  Description of Artificial Sequence: Synthetic oligonucleotide
  Target: ANGPTL4; (+) strand; PAM type: YTN; PAM sequence: CTT
taaaatgcagcccttgtctg

SEQ ID NO: 17718 - DNA, 20 bp, Artificial Sequence
  Description of Artificial Sequence: Synthetic oligonucleotide
  Target: ANGPTL4; (+) strand; PAM type: YTN; PAM sequence: TTT
aaaatgcagcccttgtctgg

SEQ ID NO: 17719 - DNA, 20 bp, Artificial Sequence
  Description of Artificial Sequence: Synthetic oligonucleotide
  Target: ANGPTL4; (+) strand; PAM type: YTN; PAM sequence: TTA
aaatgcagcccttgtctggg

SEQ ID NO: 17720 - DNA, 20 bp, Artificial Sequence
  Description of Artificial Sequence: Synthetic oligonucleotide
  Target: ANGPTL4; (+) strand; PAM type: YTN; PAM sequence: CTT
gtctgggtgtagtggctcat

SEQ ID NO: 17721 - DNA, 20 bp, Artificial Sequence
  Description of Artificial Sequence: Synthetic oligonucleotide
  Target: ANGPTL4; (+) strand; PAM type: YTN; PAM sequence: TTG
tctgggtgtagtggctcata

SEQ ID NO: 17722 - DNA, 20 bp, Artificial Sequence
  Description of Artificial Sequence: Synthetic oligonucleotide
  Target: ANGPTL4; (+) strand; PAM type: YTN; PAM sequence: CTG
ggtgtagtggctcatatctg

SEQ ID NO: 17723 - DNA, 20 bp, Artificial Sequence
  Description of Artificial Sequence: Synthetic oligonucleotide
  Target: ANGPTL4; (+) strand; PAM type: YTN; PAM sequence: CTC
atatctgtaatcccgacact

SEQ ID NO: 17724 - DNA, 20 bp, Artificial Sequence
  Description of Artificial Sequence: Synthetic oligonucleotide
  Target: ANGPTL4; (+) strand; PAM type: YTN; PAM sequence: CTG
taatcccgacactttgggag

SEQ ID NO: 17725 - DNA, 20 bp, Artificial Sequence
  Description of Artificial Sequence: Synthetic oligonucleotide
  Target: ANGPTL4; (+) strand; PAM type: YTN; PAM sequence: CTT
tgggaggcctatcatgagga

SEQ ID NO: 17726 - DNA, 20 bp, Artificial Sequence
  Description of Artificial Sequence: Synthetic oligonucleotide
  Target: ANGPTL4; (+) strand; PAM type: YTN; PAM sequence: TTT
gggaggcctatcatgaggat

SEQ ID NO: 17727 - DNA, 20 bp, Artificial Sequence
  Description of Artificial Sequence: Synthetic oligonucleotide
  Target: ANGPTL4; (+) strand; PAM type: YTN; PAM sequence: TTG
ggaggcctatcatgaggatc

SEQ ID NO: 17728 - DNA, 20 bp, Artificial Sequence
  Description of Artificial Sequence: Synthetic oligonucleotide
  Target: ANGPTL4; (+) strand; PAM type: YTN; PAM sequence: CTA
tcatgaggatcacttgagcc

SEQ ID NO: 17729 - DNA, 20 bp, Artificial Sequence
  Description of Artificial Sequence: Synthetic oligonucleotide
  Target: ANGPTL4; (+) strand; PAM type: YTN; PAM sequence: CTT
gagcccagaagttcgagacc

SEQ ID NO: 17730 - DNA, 20 bp, Artificial Sequence
  Description of Artificial Sequence: Synthetic oligonucleotide
  Target: ANGPTL4; (+) strand; PAM type: YTN; PAM sequence: TTG
agcccagaagttcgagacca

SEQ ID NO: 17731 - DNA, 20 bp, Artificial Sequence
  Description of Artificial Sequence: Synthetic oligonucleotide
  Target: ANGPTL4; (+) strand; PAM type: YTN; PAM sequence: TTC
gagaccagcctggacaacat

SEQ ID NO: 17732 - DNA, 20 bp, Artificial Sequence
  Description of Artificial Sequence: Synthetic oligonucleotide
  Target: ANGPTL4; (+) strand; PAM type: YTN; PAM sequence: CTG
gacaacatagtgagagctca

SEQ ID NO: 17733 - DNA, 20 bp, Artificial Sequence
  Description of Artificial Sequence: Synthetic oligonucleotide
  Target: ANGPTL4; (+) strand; PAM type: YTN; PAM sequence: CTC
atctttacaaaaaattttgt

SEQ ID NO: 17734 - DNA, 20 bp, Artificial Sequence
  Description of Artificial Sequence: Synthetic oligonucleotide
  Target: ANGPTL4; (+) strand; PAM type: YTN; PAM sequence: CTT
tacaaaaaattttgtaaaag

SEQ ID NO: 17735 - DNA, 20 bp, Artificial Sequence
  Description of Artificial Sequence: Synthetic oligonucleotide
  Target: ANGPTL4; (+) strand; PAM type: YTN; PAM sequence: TTT
acaaaaaattttgtaaaagt

SEQ ID NO: 17736 - DNA, 20 bp, Artificial Sequence
  Description of Artificial Sequence: Synthetic oligonucleotide
  Target: ANGPTL4; (+) strand; PAM type: YTN; PAM sequence: TTA
caaaaaattttgtaaaagta

SEQ ID NO: 17737 - DNA, 20 bp, Artificial Sequence
  Description of Artificial Sequence: Synthetic oligonucleotide
  Target: ANGPTL4; (+) strand; PAM type: YTN; PAM sequence: TTT
tgtaaaagtaaaaaaaaagg

SEQ ID NO: 17738 - DNA, 20 bp, Artificial Sequence
  Description of Artificial Sequence: Synthetic oligonucleotide
  Target: ANGPTL4; (+) strand; PAM type: YTN; PAM sequence: TTT
gtaaaagtaaaaaaaaaggc

SEQ ID NO: 17739 - DNA, 20 bp, Artificial Sequence
  Description of Artificial Sequence: Synthetic oligonucleotide
  Target: ANGPTL4; (+) strand; PAM type: YTN; PAM sequence: TTG
taaaagtaaaaaaaaaggcc

SEQ ID NO: 17740 - DNA, 20 bp, Artificial Sequence
  Description of Artificial Sequence: Synthetic oligonucleotide
  Target: ANGPTL4; (+) strand; PAM type: YTN; PAM sequence: CTC
acacctgtaatcccagcact

SEQ ID NO: 17741 - DNA, 20 bp, Artificial Sequence
  Description of Artificial Sequence: Synthetic oligonucleotide
  Target: ANGPTL4; (+) strand; PAM type: YTN; PAM sequence: CTG
taatcccagcactttgggag

SEQ ID NO: 17742 - DNA, 20 bp, Artificial Sequence
  Description of Artificial Sequence: Synthetic oligonucleotide
  Target: ANGPTL4; (+) strand; PAM type: YTN; PAM sequence: CTT
tgggaggttgaggcagacag

SEQ ID NO: 17743 - DNA, 20 bp, Artificial Sequence
  Description of Artificial Sequence: Synthetic oligonucleotide
  Target: ANGPTL4; (+) strand; PAM type: YTN; PAM sequence: TTT
gggaggttgaggcagacaga

SEQ ID NO: 17744 - DNA, 20 bp, Artificial Sequence
  Description of Artificial Sequence: Synthetic oligonucleotide
  Target: ANGPTL4; (+) strand; PAM type: YTN; PAM sequence: TTG
ggaggttgaggcagacagat

SEQ ID NO: 17745 - DNA, 20 bp, Artificial Sequence
  Description of Artificial Sequence: Synthetic oligonucleotide
  Target: ANGPTL4; (+) strand; PAM type: YTN; PAM sequence: TTG
aggcagacagatcacgaggt

SEQ ID NO: 17746 - DNA, 20 bp, Artificial Sequence
  Description of Artificial Sequence: Synthetic oligonucleotide
  Target: ANGPTL4; (+) strand; PAM type: YTN; PAM sequence: TTC
gagaccagcctgaccaacat

SEQ ID NO: 17747 - DNA, 20 bp, Artificial Sequence
  Description of Artificial Sequence: Synthetic oligonucleotide
  Target: ANGPTL4; (+) strand; PAM type: YTN; PAM sequence: CTG
accaacatggtgaaaccccg

SEQ ID NO: 17748 - DNA, 20 bp, Artificial Sequence
  Description of Artificial Sequence: Synthetic oligonucleotide
  Target: ANGPTL4; (+) strand; PAM type: YTN; PAM sequence: CTC
tactaaaaatacaaaaatta

SEQ ID NO: 17749 - DNA, 20 bp, Artificial Sequence
  Description of Artificial Sequence: Synthetic oligonucleotide
  Target: ANGPTL4; (+) strand; PAM type: YTN; PAM sequence: CTA
ctaaaaatacaaaaattagc

SEQ ID NO: 17750 - DNA, 20 bp, Artificial Sequence
  Description of Artificial Sequence: Synthetic oligonucleotide
  Target: ANGPTL4; (+) strand; PAM type: YTN; PAM sequence: CTA
aaaatacaaaaattagccgg

SEQ ID NO: 17751 - DNA, 20 bp, Artificial Sequence
  Description of Artificial Sequence: Synthetic oligonucleotide
  Target: ANGPTL4; (+) strand; PAM type: YTN; PAM sequence: TTA
gccgggcatggtggtgtgca

SEQ ID NO: 17752 - DNA, 20 bp, Artificial Sequence
  Description of Artificial Sequence: Synthetic oligonucleotide
  Target: ANGPTL4; (+) strand; PAM type: YTN; PAM sequence: CTG
taatcccagctactcaggtg

SEQ ID NO: 17753 - DNA, 20 bp, Artificial Sequence
  Description of Artificial Sequence: Synthetic oligonucleotide
  Target: ANGPTL4; (+) strand; PAM type: YTN; PAM sequence: CTA
ctcaggtggctgaggcagga

SEQ ID NO: 17754 - DNA, 20 bp, Artificial Sequence
  Description of Artificial Sequence: Synthetic oligonucleotide
  Target: ANGPTL4; (+) strand; PAM type: YTN; PAM sequence: CTC
aggtggctgaggcaggagaa

SEQ ID NO: 17755 - DNA, 20 bp, Artificial Sequence
  Description of Artificial Sequence: Synthetic oligonucleotide
  Target: ANGPTL4; (+) strand; PAM type: YTN; PAM sequence: CTG
aggcaggagaatctcttgaa

SEQ ID NO: 17756 - DNA, 20 bp, Artificial Sequence
  Description of Artificial Sequence: Synthetic oligonucleotide
  Target: ANGPTL4; (+) strand; PAM type: YTN; PAM sequence: CTC
ttgaacctgggaggcagagg

SEQ ID NO: 17757 - DNA, 20 bp, Artificial Sequence
  Description of Artificial Sequence: Synthetic oligonucleotide
  Target: ANGPTL4; (+) strand; PAM type: YTN; PAM sequence: CTT
gaacctgggaggcagaggtt

SEQ ID NO: 17758 - DNA, 20 bp, Artificial Sequence
  Description of Artificial Sequence: Synthetic oligonucleotide
  Target: ANGPTL4; (+) strand; PAM type: YTN; PAM sequence: TTG
aacctgggaggcagaggttg

SEQ ID NO: 17759 - DNA, 20 bp, Artificial Sequence
  Description of Artificial Sequence: Synthetic oligonucleotide
  Target: ANGPTL4; (+) strand; PAM type: YTN; PAM sequence: CTG
ggaggcagaggttgcagtga

SEQ ID NO: 17760 - DNA, 20 bp, Artificial Sequence
  Description of Artificial Sequence: Synthetic oligonucleotide
  Target: ANGPTL4; (+) strand; PAM type: YTN; PAM sequence: TTG
cagtgagctgagatgacgcc

SEQ ID NO: 17761 - DNA, 20 bp, Artificial Sequence
  Description of Artificial Sequence: Synthetic oligonucleotide
  Target: ANGPTL4; (+) strand; PAM type: YTN; PAM sequence: CTG
agatgacgccaccgcactcc

SEQ ID NO: 17762 - DNA, 20 bp, Artificial Sequence
  Description of Artificial Sequence: Synthetic oligonucleotide
  Target: ANGPTL4; (+) strand; PAM type: YTN; PAM sequence: CTC
cagcctgggcgacagagcga

SEQ ID NO: 17763 - DNA, 20 bp, Artificial Sequence
  Description of Artificial Sequence: Synthetic oligonucleotide
  Target: ANGPTL4; (+) strand; PAM type: YTN; PAM sequence: CTG
ggcgacagagcgagactccg

SEQ ID NO: 17764 - DNA, 20 bp, Artificial Sequence
  Description of Artificial Sequence: Synthetic oligonucleotide
  Target: ANGPTL4; (+) strand; PAM type: YTN; PAM sequence: CTC
cgtccccccatcaaaaaaat

SEQ ID NO: 17765 - DNA, 20 bp, Artificial Sequence
  Description of Artificial Sequence: Synthetic oligonucleotide
  Target: ANGPTL4; (+) strand; PAM type: YTN; PAM sequence: TTC
agcccttgctgggcatggtg

SEQ ID NO: 17766 - DNA, 20 bp, Artificial Sequence
  Description of Artificial Sequence: Synthetic oligonucleotide
  Target: ANGPTL4; (+) strand; PAM type: YTN; PAM sequence: CTT
gctgggcatggtggcacatg

SEQ ID NO: 17767 - DNA, 20 bp, Artificial Sequence
  Description of Artificial Sequence: Synthetic oligonucleotide
  Target: ANGPTL4; (+) strand; PAM type: YTN; PAM sequence: TTG
ctgggcatggtggcacatgc

SEQ ID NO: 17768 - DNA, 20 bp, Artificial Sequence
  Description of Artificial Sequence: Synthetic oligonucleotide
  Target: ANGPTL4; (+) strand; PAM type: YTN; PAM sequence: CTG
ggcatggtggcacatgcctg

SEQ ID NO: 17769 - DNA, 20 bp, Artificial Sequence
  Description of Artificial Sequence: Synthetic oligonucleotide
  Target: ANGPTL4; (+) strand; PAM type: YTN; PAM sequence: CTG
tagtcccagctactcgggag

SEQ ID NO: 17770 - DNA, 20 bp, Artificial Sequence
  Description of Artificial Sequence: Synthetic oligonucleotide
  Target: ANGPTL4; (+) strand; PAM type: YTN; PAM sequence: CTA
ctcgggaggccaaggcagga

SEQ ID NO: 17771 - DNA, 20 bp, Artificial Sequence
  Description of Artificial Sequence: Synthetic oligonucleotide
  Target: ANGPTL4; (+) strand; PAM type: YTN; PAM sequence: CTC
gggaggccaaggcaggaggg

SEQ ID NO: 17772 - DNA, 20 bp, Artificial Sequence
  Description of Artificial Sequence: Synthetic oligonucleotide
  Target: ANGPTL4; (+) strand; PAM type: YTN; PAM sequence: CTT
cagcccaggagttaaaggct

SEQ ID NO: 17773 - DNA, 20 bp, Artificial Sequence
  Description of Artificial Sequence: Synthetic oligonucleotide
  Target: ANGPTL4; (+) strand; PAM type: YTN; PAM sequence: TTC
agcccaggagttaaaggctg

SEQ ID NO: 17774 - DNA, 20 bp, Artificial Sequence
  Description of Artificial Sequence: Synthetic oligonucleotide
  Target: ANGPTL4; (+) strand; PAM type: YTN; PAM sequence: TTA
aaggctgccgtgagccgtga

SEQ ID NO: 17775 - DNA, 20 bp, Artificial Sequence
  Description of Artificial Sequence: Synthetic oligonucleotide
  Target: ANGPTL4; (+) strand; PAM type: YTN; PAM sequence: CTG
ccgtgagccgtgatcacacc

SEQ ID NO: 17776 - DNA, 20 bp, Artificial Sequence
  Description of Artificial Sequence: Synthetic oligonucleotide
  Target: ANGPTL4; (+) strand; PAM type: YTN; PAM sequence: CTG
tgaatagccaccgcactcca

SEQ ID NO: 17777 - DNA, 20 bp, Artificial Sequence
  Description of Artificial Sequence: Synthetic oligonucleotide
  Target: ANGPTL4; (+) strand; PAM type: YTN; PAM sequence: CTC
caacctgggcaacacaacaa

SEQ ID NO: 17778 - DNA, 20 bp, Artificial Sequence
  Description of Artificial Sequence: Synthetic oligonucleotide
  Target: ANGPTL4; (+) strand; PAM type: YTN; PAM sequence: CTG
ggcaacacaacaaaacctcg

SEQ ID NO: 17779 - DNA, 20 bp, Artificial Sequence
  Description of Artificial Sequence: Synthetic oligonucleotide
  Target: ANGPTL4; (+) strand; PAM type: YTN; PAM sequence: CTC
gtttctaaaaaaaaacaaag

SEQ ID NO: 17780 - DNA, 20 bp, Artificial Sequence
  Description of Artificial Sequence: Synthetic oligonucleotide
  Target: ANGPTL4; (+) strand; PAM type: YTN; PAM sequence: TTT
ctaaaaaaaaacaaaggctg

SEQ ID NO: 17781 - DNA, 20 bp, Artificial Sequence
  Description of Artificial Sequence: Synthetic oligonucleotide
  Target: ANGPTL4; (+) strand; PAM type: YTN; PAM sequence: TTC
taaaaaaaaacaaaggctga

SEQ ID NO: 17782 - DNA, 20 bp, Artificial Sequence
  Description of Artificial Sequence: Synthetic oligonucleotide
  Target: ANGPTL4; (+) strand; PAM type: YTN; PAM sequence: CTA
aaaaaaaacaaaggctgagc

SEQ ID NO: 17783 - DNA, 20 bp, Artificial Sequence
  Description of Artificial Sequence: Synthetic oligonucleotide
  Target: ANGPTL4; (+) strand; PAM type: YTN; PAM sequence: CTG
agcacggtggcttacacctg

SEQ ID NO: 17784 - DNA, 20 bp, Artificial Sequence
  Description of Artificial Sequence: Synthetic oligonucleotide
  Target: ANGPTL4; (+) strand; PAM type: YTN; PAM sequence: CTT
acacctgaaatgccagcact

SEQ ID NO: 17785 - DNA, 20 bp, Artificial Sequence
  Description of Artificial Sequence: Synthetic oligonucleotide
  Target: ANGPTL4; (+) strand; PAM type: YTN; PAM sequence: TTA
cacctgaaatgccagcactt

SEQ ID NO: 17786 - DNA, 20 bp, Artificial Sequence
  Description of Artificial Sequence: Synthetic oligonucleotide
  Target: ANGPTL4; (+) strand; PAM type: YTN; PAM sequence: CTG
aaatgccagcactttgggag

SEQ ID NO: 17787 - DNA, 20 bp, Artificial Sequence
  Description of Artificial Sequence: Synthetic oligonucleotide
  Target: ANGPTL4; (+) strand; PAM type: YTN; PAM sequence: CTT
tgggaggctgaggcgggcaa

SEQ ID NO: 17788 - DNA, 20 bp, Artificial Sequence
  Description of Artificial Sequence: Synthetic oligonucleotide
  Target: ANGPTL4; (+) strand; PAM type: YTN; PAM sequence: TTT
gggaggctgaggcgggcaaa

SEQ ID NO: 17789 - DNA, 20 bp, Artificial Sequence
  Description of Artificial Sequence: Synthetic oligonucleotide
  Target: ANGPTL4; (+) strand; PAM type: YTN; PAM sequence: TTG
ggaggctgaggcgggcaaat

SEQ ID NO: 17790 - DNA, 20 bp, Artificial Sequence
  Description of Artificial Sequence: Synthetic oligonucleotide
  Target: ANGPTL4; (+) strand; PAM type: YTN; PAM sequence: CTG
aggcgggcaaatcacttgag

SEQ ID NO: 17791 - DNA, 20 bp, Artificial Sequence
  Description of Artificial Sequence: Synthetic oligonucleotide
  Target: ANGPTL4; (+) strand; PAM type: YTN; PAM sequence: CTT
gaggtcagaagttcaagacc

SEQ ID NO: 17792 - DNA, 20 bp, Artificial Sequence
  Description of Artificial Sequence: Synthetic oligonucleotide
  Target: ANGPTL4; (+) strand; PAM type: YTN; PAM sequence: TTG
aggtcagaagttcaagacca

SEQ ID NO: 17793 - DNA, 20 bp, Artificial Sequence
  Description of Artificial Sequence: Synthetic oligonucleotide
  Target: ANGPTL4; (+) strand; PAM type: YTN; PAM sequence: TTC
aagaccagcctggccaacat

SEQ ID NO: 17794 - DNA, 20 bp, Artificial Sequence
  Description of Artificial Sequence: Synthetic oligonucleotide
  Target: ANGPTL4; (+) strand; PAM type: YTN; PAM sequence: CTG
gccaacatggtgaaacccta

SEQ ID NO: 17795 - DNA, 20 bp, Artificial Sequence
  Description of Artificial Sequence: Synthetic oligonucleotide
  Target: ANGPTL4; (+) strand; PAM type: YTN; PAM sequence: CTA
tctctaccaacataaacatt

SEQ ID NO: 17796 - DNA, 20 bp, Artificial Sequence
  Description of Artificial Sequence: Synthetic oligonucleotide
  Target: ANGPTL4; (+) strand; PAM type: YTN; PAM sequence: CTC
taccaacataaacattagcc

SEQ ID NO: 17797 - DNA, 20 bp, Artificial Sequence
  Description of Artificial Sequence: Synthetic oligonucleotide
  Target: ANGPTL4; (+) strand; PAM type: YTN; PAM sequence: CTA
ccaacataaacattagccgg

SEQ ID NO: 17798 - DNA, 20 bp, Artificial Sequence
  Description of Artificial Sequence: Synthetic oligonucleotide
  Target: ANGPTL4; (+) strand; PAM type: YTN; PAM sequence: TTA
gccgggcgtgcctgtgattc

SEQ ID NO: 17799 - DNA, 20 bp, Artificial Sequence
  Description of Artificial Sequence: Synthetic oligonucleotide
  Target: ANGPTL4; (+) strand; PAM type: YTN; PAM sequence: CTG
tgattccagctgcttgtggg

SEQ ID NO: 17800 - DNA, 20 bp, Artificial Sequence
  Description of Artificial Sequence: Synthetic oligonucleotide
  Target: ANGPTL4; (+) strand; PAM type: YTN; PAM sequence: TTC
cagctgcttgtggggctgaa

SEQ ID NO: 17801 - DNA, 20 bp, Artificial Sequence
  Description of Artificial Sequence: Synthetic oligonucleotide
  Target: ANGPTL4; (+) strand; PAM type: YTN; PAM sequence: CTG
cttgtggggctgaagcacaa

SEQ ID NO: 17802 - DNA, 20 bp, Artificial Sequence
  Description of Artificial Sequence: Synthetic oligonucleotide
  Target: ANGPTL4; (+) strand; PAM type: YTN; PAM sequence: CTT
gtggggctgaagcacaagaa

SEQ ID NO: 17803 - DNA, 20 bp, Artificial Sequence
  Description of Artificial Sequence: Synthetic oligonucleotide
  Target: ANGPTL4; (+) strand; PAM type: YTN; PAM sequence: TTG
tggggctgaagcacaagaat

SEQ ID NO: 17804 - DNA, 20 bp, Artificial Sequence
  Description of Artificial Sequence: Synthetic oligonucleotide
  Target: ANGPTL4; (+) strand; PAM type: YTN; PAM sequence: CTG
aagcacaagaatcgcttgag

SEQ ID NO: 17805 - DNA, 20 bp, Artificial Sequence
  Description of Artificial Sequence: Synthetic oligonucleotide
  Target: ANGPTL4; (+) strand; PAM type: YTN; PAM sequence: CTT
gagccccgaaggcagaggtt

SEQ ID NO: 17806 - DNA, 20 bp, Artificial Sequence
  Description of Artificial Sequence: Synthetic oligonucleotide
  Target: ANGPTL4; (+) strand; PAM type: YTN; PAM sequence: TTG
agccccgaaggcagaggttg

SEQ ID NO: 17807 - DNA, 20 bp, Artificial Sequence
  Description of Artificial Sequence: Synthetic oligonucleotide
  Target: ANGPTL4; (+) strand; PAM type: YTN; PAM sequence: TTG
cagtgagctgagattgcggc

SEQ ID NO: 17808 - DNA, 20 bp, Artificial Sequence
  Description of Artificial Sequence: Synthetic oligonucleotide
  Target: ANGPTL4; (+) strand; PAM type: YTN; PAM sequence: CTG
agattgcggcactgcgatcc

SEQ ID NO: 17809 - DNA, 20 bp, Artificial Sequence
  Description of Artificial Sequence: Synthetic oligonucleotide
  Target: ANGPTL4; (+) strand; PAM type: YTN; PAM sequence: TTG
cggcactgcgatccagcctg

SEQ ID NO: 17810 - DNA, 20 bp, Artificial Sequence
  Description of Artificial Sequence: Synthetic oligonucleotide
  Target: ANGPTL4; (+) strand; PAM type: YTN; PAM sequence: CTG
cgatccagcctgggcaacag

SEQ ID NO: 17811 - DNA, 20 bp, Artificial Sequence
  Description of Artificial Sequence: Synthetic oligonucleotide
  Target: ANGPTL4; (+) strand; PAM type: YTN; PAM sequence: CTG
ggcaacagagtgagactcca

SEQ ID NO: 17812 - DNA, 20 bp, Artificial Sequence
  Description of Artificial Sequence: Synthetic oligonucleotide
  Target: ANGPTL4; (+) strand; PAM type: YTN; PAM sequence: CTC
catctctaaaaaaaaaaaaa

SEQ ID NO: 17813 - DNA, 20 bp, Artificial Sequence
  Description of Artificial Sequence: Synthetic oligonucleotide
  Target: ANGPTL4; (+) strand; PAM type: YTN; PAM sequence: CTC
taaaaaaaaaaaaaaaaaaa

SEQ ID NO: 17814 - DNA, 20 bp, Artificial Sequence
  Description of Artificial Sequence: Synthetic oligonucleotide
  Target: ANGPTL4; (+) strand; PAM type: YTN; PAM sequence: CTA
aaaaaaaaaaaaaaaaaaaa

SEQ ID NO: 17815 - DNA, 20 bp, Artificial Sequence
  Description of Artificial Sequence: Synthetic oligonucleotide
  Target: ANGPTL4; (+) strand; PAM type: YTN; PAM sequence: CTT
ttttttccactgagaagtcc

SEQ ID NO: 17816 - DNA, 20 bp, Artificial Sequence
  Description of Artificial Sequence: Synthetic oligonucleotide
  Target: ANGPTL4; (+) strand; PAM type: YTN; PAM sequence: TTT
tttttccactgagaagtcct

SEQ ID NO: 17817 - DNA, 20 bp, Artificial Sequence
  Description of Artificial Sequence: Synthetic oligonucleotide
  Target: ANGPTL4; (+) strand; PAM type: YTN; PAM sequence: TTT
ttttccactgagaagtcctt

SEQ ID NO: 17818 - DNA, 20 bp, Artificial Sequence
  Description of Artificial Sequence: Synthetic oligonucleotide
  Target: ANGPTL4; (+) strand; PAM type: YTN; PAM sequence: TTT
tttccactgagaagtccttt

SEQ ID NO: 17819 - DNA, 20 bp, Artificial Sequence
  Description of Artificial Sequence: Synthetic oligonucleotide
  Target: ANGPTL4; (+) strand; PAM type: YTN; PAM sequence: TTT
ttccactgagaagtcctttc

SEQ ID NO: 17820 - DNA, 20 bp, Artificial Sequence
  Description of Artificial Sequence: Synthetic oligonucleotide
  Target: ANGPTL4; (+) strand; PAM type: YTN; PAM sequence: TTT
tccactgagaagtcctttcc

SEQ ID NO: 17821 - DNA, 20 bp, Artificial Sequence
  Description of Artificial Sequence: Synthetic oligonucleotide
  Target: ANGPTL4; (+) strand; PAM type: YTN; PAM sequence: TTT
ccactgagaagtcctttcca

SEQ ID NO: 17822 - DNA, 20 bp, Artificial Sequence
  Description of Artificial Sequence: Synthetic oligonucleotide
  Target: ANGPTL4; (+) strand; PAM type: YTN; PAM sequence: TTC
cactgagaagtcctttccat

SEQ ID NO: 17823 - DNA, 20 bp, Artificial Sequence
  Description of Artificial Sequence: Synthetic oligonucleotide
  Target: ANGPTL4; (+) strand; PAM type: YTN; PAM sequence: CTG
agaagtcctttccattacaa

SEQ ID NO: 17824 - DNA, 20 bp, Artificial Sequence
  Description of Artificial Sequence: Synthetic oligonucleotide
  Target: ANGPTL4; (+) strand; PAM type: YTN; PAM sequence: CTT
tccattacaagaggttacaa

SEQ ID NO: 17825 - DNA, 20 bp, Artificial Sequence
  Description of Artificial Sequence: Synthetic oligonucleotide
  Target: ANGPTL4; (+) strand; PAM type: YTN; PAM sequence: TTT
ccattacaagaggttacaac

SEQ ID NO: 17826 - DNA, 20 bp, Artificial Sequence
  Description of Artificial Sequence: Synthetic oligonucleotide
  Target: ANGPTL4; (+) strand; PAM type: YTN; PAM sequence: TTC
cattacaagaggttacaaca

SEQ ID NO: 17827 - DNA, 20 bp, Artificial Sequence
  Description of Artificial Sequence: Synthetic oligonucleotide
  Target: ANGPTL4; (+) strand; PAM type: YTN; PAM sequence: TTA
caagaggttacaacacgggg

SEQ ID NO: 17828 - DNA, 20 bp, Artificial Sequence
  Description of Artificial Sequence: Synthetic oligonucleotide
  Target: ANGPTL4; (+) strand; PAM type: YTN; PAM sequence: TTA
caacacggggttttacccag

SEQ ID NO: 17829 - DNA, 20 bp, Artificial Sequence
  Description of Artificial Sequence: Synthetic oligonucleotide
  Target: ANGPTL4; (+) strand; PAM type: YTN; PAM sequence: TTT
tacccagttcagctggccca

SEQ ID NO: 17830 - DNA, 20 bp, Artificial Sequence
  Description of Artificial Sequence: Synthetic oligonucleotide
  Target: ANGPTL4; (+) strand; PAM type: YTN; PAM sequence: TTT
acccagttcagctggcccag

SEQ ID NO: 17831 - DNA, 20 bp, Artificial Sequence
  Description of Artificial Sequence: Synthetic oligonucleotide
  Target: ANGPTL4; (+) strand; PAM type: YTN; PAM sequence: TTA
cccagttcagctggcccaga

SEQ ID NO: 17832 - DNA, 20 bp, Artificial Sequence
  Description of Artificial Sequence: Synthetic oligonucleotide
  Target: ANGPTL4; (+) strand; PAM type: YTN; PAM sequence: TTC
agctggcccagagaggcttt

SEQ ID NO: 17833 - DNA, 20 bp, Artificial Sequence
  Description of Artificial Sequence: Synthetic oligonucleotide
  Target: ANGPTL4; (+) strand; PAM type: YTN; PAM sequence: CTG
gcccagagaggctttgcaga

SEQ ID NO: 17834 - DNA, 20 bp, Artificial Sequence
  Description of Artificial Sequence: Synthetic oligonucleotide
  Target: ANGPTL4; (+) strand; PAM type: YTN; PAM sequence: CTT
tgcagatttccactgcctac

SEQ ID NO: 17835 - DNA, 20 bp, Artificial Sequence
  Description of Artificial Sequence: Synthetic oligonucleotide
  Target: ANGPTL4; (+) strand; PAM type: YTN; PAM sequence: TTT
gcagatttccactgcctact

SEQ ID NO: 17836 - DNA, 20 bp, Artificial Sequence
  Description of Artificial Sequence: Synthetic oligonucleotide
  Target: ANGPTL4; (+) strand; PAM type: YTN; PAM sequence: TTG
cagatttccactgcctactc

SEQ ID NO: 17837 - DNA, 20 bp, Artificial Sequence
  Description of Artificial Sequence: Synthetic oligonucleotide
  Target: ANGPTL4; (+) strand; PAM type: YTN; PAM sequence: TTT
ccactgcctactccctccca

SEQ ID NO: 17838 - DNA, 20 bp, Artificial Sequence
  Description of Artificial Sequence: Synthetic oligonucleotide
  Target: ANGPTL4; (+) strand; PAM type: YTN; PAM sequence: TTC
cactgcctactccctcccac

SEQ ID NO: 17839 - DNA, 20 bp, Artificial Sequence
  Description of Artificial Sequence: Synthetic oligonucleotide
  Target: ANGPTL4; (+) strand; PAM type: YTN; PAM sequence: CTG
cctactccctcccacactca

SEQ ID NO: 17840 - DNA, 20 bp, Artificial Sequence
  Description of Artificial Sequence: Synthetic oligonucleotide
  Target: ANGPTL4; (+) strand; PAM type: YTN; PAM sequence: CTA
ctccctcccacactcagtcc

SEQ ID NO: 17841 - DNA, 20 bp, Artificial Sequence
  Description of Artificial Sequence: Synthetic oligonucleotide
  Target: ANGPTL4; (+) strand; PAM type: YTN; PAM sequence: CTC
cctcccacactcagtccctg

SEQ ID NO: 17842 - DNA, 20 bp, Artificial Sequence
  Description of Artificial Sequence: Synthetic oligonucleotide
  Target: ANGPTL4; (+) strand; PAM type: YTN; PAM sequence: CTC
ccacactcagtccctgctgg

SEQ ID NO: 17843 - DNA, 20 bp, Artificial Sequence
  Description of Artificial Sequence: Synthetic oligonucleotide
  Target: ANGPTL4; (+) strand; PAM type: YTN; PAM sequence: CTC
agtccctgctgggttcttgg

SEQ ID NO: 17844 - DNA, 20 bp, Artificial Sequence
  Description of Artificial Sequence: Synthetic oligonucleotide
  Target: ANGPTL4; (+) strand; PAM type: YTN; PAM sequence: CTG
ctgggttcttgggacaaaga

SEQ ID NO: 17845 - DNA, 20 bp, Artificial Sequence
  Description of Artificial Sequence: Synthetic oligonucleotide
  Target: ANGPTL4; (+) strand; PAM type: YTN; PAM sequence: CTG
ggttcttgggacaaagatct

SEQ ID NO: 17846 - DNA, 20 bp, Artificial Sequence
  Description of Artificial Sequence: Synthetic oligonucleotide
  Target: ANGPTL4; (+) strand; PAM type: YTN; PAM sequence: TTC
ttgggacaaagatcttccca

SEQ ID NO: 17847 - DNA, 20 bp, Artificial Sequence
  Description of Artificial Sequence: Synthetic oligonucleotide
  Target: ANGPTL4; (+) strand; PAM type: YTN; PAM sequence: CTT
gggacaaagatcttcccaag

SEQ ID NO: 17848 - DNA, 20 bp, Artificial Sequence
  Description of Artificial Sequence: Synthetic oligonucleotide
  Target: ANGPTL4; (+) strand; PAM type: YTN; PAM sequence: TTG
ggacaaagatcttcccaagg

SEQ ID NO: 17849 - DNA, 20 bp, Artificial Sequence
  Description of Artificial Sequence: Synthetic oligonucleotide
  Target: ANGPTL4; (+) strand; PAM type: YTN; PAM sequence: CTT
cccaaggccagcccataata

SEQ ID NO: 17850 - DNA, 20 bp, Artificial Sequence
  Description of Artificial Sequence: Synthetic oligonucleotide
  Target: ANGPTL4; (+) strand; PAM type: YTN; PAM sequence: TTC
ccaaggccagcccataatat

SEQ ID NO: 17851 - DNA, 20 bp, Artificial Sequence
  Description of Artificial Sequence: Synthetic oligonucleotide
  Target: ANGPTL4; (+) strand; PAM type: YTN; PAM sequence: TTC
ctccctctgacccaccctcc

SEQ ID NO: 17852 - DNA, 20 bp, Artificial Sequence
  Description of Artificial Sequence: Synthetic oligonucleotide
  Target: ANGPTL4; (+) strand; PAM type: YTN; PAM sequence: CTC
cctctgacccaccctcctcg

SEQ ID NO: 17853 - DNA, 20 bp, Artificial Sequence
  Description of Artificial Sequence: Synthetic oligonucleotide
  Target: ANGPTL4; (+) strand; PAM type: YTN; PAM sequence: CTC
tgacccaccctcctcgagtc

SEQ ID NO: 17854 - DNA, 20 bp, Artificial Sequence
  Description of Artificial Sequence: Synthetic oligonucleotide
  Target: ANGPTL4; (+) strand; PAM type: YTN; PAM sequence: CTG
acccaccctcctcgagtcct

SEQ ID NO: 17855 - DNA, 20 bp, Artificial Sequence
  Description of Artificial Sequence: Synthetic oligonucleotide
  Target: ANGPTL4; (+) strand; PAM type: YTN; PAM sequence: CTC
ctcgagtcctccagggatga

SEQ ID NO: 17856 - DNA, 20 bp, Artificial Sequence
  Description of Artificial Sequence: Synthetic oligonucleotide
  Target: ANGPTL4; (+) strand; PAM type: YTN; PAM sequence: CTC
gagtcctccagggatgagtg

SEQ ID NO: 17857 - DNA, 20 bp, Artificial Sequence
  Description of Artificial Sequence: Synthetic oligonucleotide
  Target: ANGPTL4; (+) strand; PAM type: YTN; PAM sequence: CTC
cagggatgagtgagggagct

SEQ ID NO: 17858 - DNA, 20 bp, Artificial Sequence
  Description of Artificial Sequence: Synthetic oligonucleotide
  Target: ANGPTL4; (+) strand; PAM type: YTN; PAM sequence: CTG
ctgtcttcctgggtttggag

SEQ ID NO: 17859 - DNA, 20 bp, Artificial Sequence
  Description of Artificial Sequence: Synthetic oligonucleotide
  Target: ANGPTL4; (+) strand; PAM type: YTN; PAM sequence: CTG
tcttcctgggtttggagggg

SEQ ID NO: 17860 - DNA, 20 bp, Artificial Sequence
  Description of Artificial Sequence: Synthetic oligonucleotide
  Target: ANGPTL4; (+) strand; PAM type: YTN; PAM sequence: CTT
cctgggtttggagggggttt

SEQ ID NO: 17861 - DNA, 20 bp, Artificial Sequence
  Description of Artificial Sequence: Synthetic oligonucleotide
  Target: ANGPTL4; (+) strand; PAM type: YTN; PAM sequence: TTC
ctgggtttggagggggtttg

SEQ ID NO: 17862 - DNA, 20 bp, Artificial Sequence
  Description of Artificial Sequence: Synthetic oligonucleotide
  Target: ANGPTL4; (+) strand; PAM type: YTN; PAM sequence: CTG
ggtttggagggggtttggtg

SEQ ID NO: 17863 - DNA, 20 bp, Artificial Sequence
  Description of Artificial Sequence: Synthetic oligonucleotide
  Target: ANGPTL4; (+) strand; PAM type: YTN; PAM sequence: TTT
ggagggggtttggtgcttgg

SEQ ID NO: 17864 - DNA, 20 bp, Artificial Sequence
  Description of Artificial Sequence: Synthetic oligonucleotide
  Target: ANGPTL4; (+) strand; PAM type: YTN; PAM sequence: TTG
gagggggtttggtgcttggc

SEQ ID NO: 17865 - DNA, 20 bp, Artificial Sequence
  Description of Artificial Sequence: Synthetic oligonucleotide
  Target: ANGPTL4; (+) strand; PAM type: YTN; PAM sequence: TTT
ggtgcttggcagccagatga

SEQ ID NO: 17866 - DNA, 20 bp, Artificial Sequence
  Description of Artificial Sequence: Synthetic oligonucleotide
  Target: ANGPTL4; (+) strand; PAM type: YTN; PAM sequence: TTG
gtgcttggcagccagatgag

SEQ ID NO: 17867 - DNA, 20 bp, Artificial Sequence
  Description of Artificial Sequence: Synthetic oligonucleotide
  Target: ANGPTL4; (+) strand; PAM type: YTN; PAM sequence: CTT
ggcagccagatgagggagtg

SEQ ID NO: 17868 - DNA, 20 bp, Artificial Sequence
  Description of Artificial Sequence: Synthetic oligonucleotide
  Target: ANGPTL4; (+) strand; PAM type: YTN; PAM sequence: TTG
gcagccagatgagggagtgg

SEQ ID NO: 17869 - DNA, 20 bp, Artificial Sequence
  Description of Artificial Sequence: Synthetic oligonucleotide
  Target: ANGPTL4; (+) strand; PAM type: YTN; PAM sequence: CTG
tgaagagggacttcctggtg

SEQ ID NO: 17870 - DNA, 20 bp, Artificial Sequence
  Description of Artificial Sequence: Synthetic oligonucleotide
  Target: ANGPTL4; (+) strand; PAM type: YTN; PAM sequence: CTT
cctggtgaccttgtaccttt

SEQ ID NO: 17871 - DNA, 20 bp, Artificial Sequence
  Description of Artificial Sequence: Synthetic oligonucleotide
  Target: ANGPTL4; (+) strand; PAM type: YTN; PAM sequence: TTC
ctggtgaccttgtacctttc

SEQ ID NO: 17872 - DNA, 20 bp, Artificial Sequence
  Description of Artificial Sequence: Synthetic oligonucleotide
  Target: ANGPTL4; (+) strand; PAM type: YTN; PAM sequence: CTG
gtgaccttgtacctttctgg

SEQ ID NO: 17873 - DNA, 20 bp, Artificial Sequence
  Description of Artificial Sequence: Synthetic oligonucleotide
  Target: ANGPTL4; (+) strand; PAM type: YTN; PAM sequence: CTT
gtacctttctgggcagatgg

SEQ ID NO: 17874 - DNA, 20 bp, Artificial Sequence
  Description of Artificial Sequence: Synthetic oligonucleotide
  Target: ANGPTL4; (+) strand; PAM type: YTN; PAM sequence: TTG
tacctttctgggcagatgga

SEQ ID NO: 17875 - DNA, 20 bp, Artificial Sequence
  Description of Artificial Sequence: Synthetic oligonucleotide
  Target: ANGPTL4; (+) strand; PAM type: YTN; PAM sequence: CTT
tctgggcagatggaggctgg

SEQ ID NO: 17876 - DNA, 20 bp, Artificial Sequence
  Description of Artificial Sequence: Synthetic oligonucleotide
  Target: ANGPTL4; (+) strand; PAM type: YTN; PAM sequence: TTT
ctgggcagatggaggctgga

SEQ ID NO: 17877 - DNA, 20 bp, Artificial Sequence
  Description of Artificial Sequence: Synthetic oligonucleotide
  Target: ANGPTL4; (+) strand; PAM type: YTN; PAM sequence: TTC
tgggcagatggaggctggac

SEQ ID NO: 17878 - DNA, 20 bp, Artificial Sequence
  Description of Artificial Sequence: Synthetic oligonucleotide
  Target: ANGPTL4; (+) strand; PAM type: YTN; PAM sequence: CTG
ggcagatggaggctggacag

SEQ ID NO: 17879 - DNA, 20 bp, Artificial Sequence
  Description of Artificial Sequence: Synthetic oligonucleotide
  Target: ANGPTL4; (+) strand; PAM type: YTN; PAM sequence: CTG
gacagtaattcagaggcgcc

SEQ ID NO: 17880 - DNA, 20 bp, Artificial Sequence
  Description of Artificial Sequence: Synthetic oligonucleotide
  Target: ANGPTL4; (+) strand; PAM type: YTN; PAM sequence: TTC
agaggcgccacgatggctca

SEQ ID NO: 17881 - DNA, 20 bp, Artificial Sequence
  Description of Artificial Sequence: Synthetic oligonucleotide
  Target: ANGPTL4; (+) strand; PAM type: YTN; PAM sequence: CTC
agtggacttcaaccggccct

SEQ ID NO: 17882 - DNA, 20 bp, Artificial Sequence
  Description of Artificial Sequence: Synthetic oligonucleotide
  Target: ANGPTL4; (+) strand; PAM type: YTN; PAM sequence: CTT
caaccggccctgggaagcct

SEQ ID NO: 17883 - DNA, 20 bp, Artificial Sequence
  Description of Artificial Sequence: Synthetic oligonucleotide
  Target: ANGPTL4; (+) strand; PAM type: YTN; PAM sequence: TTC
aaccggccctgggaagccta

SEQ ID NO: 17884 - DNA, 20 bp, Artificial Sequence
  Description of Artificial Sequence: Synthetic oligonucleotide
  Target: ANGPTL4; (+) strand; PAM type: YTN; PAM sequence: CTG
ggaagcctacaaggcggggt

SEQ ID NO: 17885 - DNA, 20 bp, Artificial Sequence
  Description of Artificial Sequence: Synthetic oligonucleotide
  Target: ANGPTL4; (+) strand; PAM type: YTN; PAM sequence: CTA
caaggcggggtttggggatc

SEQ ID NO: 17886 - DNA, 20 bp, Artificial Sequence
  Description of Artificial Sequence: Synthetic oligonucleotide
  Target: ANGPTL4; (+) strand; PAM type: YTN; PAM sequence: TTT
ggggatccccacggtaggtg

SEQ ID NO: 17887 - DNA, 20 bp, Artificial Sequence
  Description of Artificial Sequence: Synthetic oligonucleotide
  Target: ANGPTL4; (+) strand; PAM type: YTN; PAM sequence: TTG
gggatccccacggtaggtgt

SEQ ID NO: 17888 - DNA, 20 bp, Artificial Sequence
  Description of Artificial Sequence: Synthetic oligonucleotide
  Target: ANGPTL4; (+) strand; PAM type: YTN; PAM sequence: TTT
ctagtggggacagaggcagg

SEQ ID NO: 17889 - DNA, 20 bp, Artificial Sequence
  Description of Artificial Sequence: Synthetic oligonucleotide
  Target: ANGPTL4; (+) strand; PAM type: YTN; PAM sequence: TTC
tagtggggacagaggcaggg

SEQ ID NO: 17890 - DNA, 20 bp, Artificial Sequence
  Description of Artificial Sequence: Synthetic oligonucleotide
  Target: ANGPTL4; (+) strand; PAM type: YTN; PAM sequence: CTA
gtggggacagaggcagggga

SEQ ID NO: 17891 - DNA, 20 bp, Artificial Sequence
  Description of Artificial Sequence: Synthetic oligonucleotide
  Target: ANGPTL4; (+) strand; PAM type: YTN; PAM sequence: CTC
agaagtggccctgcctcatg

SEQ ID NO: 17892 - DNA, 20 bp, Artificial Sequence
  Description of Artificial Sequence: Synthetic oligonucleotide
  Target: ANGPTL4; (+) strand; PAM type: YTN; PAM sequence: CTG
cctcatggagtggcctctcc

SEQ ID NO: 17893 - DNA, 20 bp, Artificial Sequence
  Description of Artificial Sequence: Synthetic oligonucleotide
  Target: ANGPTL4; (+) strand; PAM type: YTN; PAM sequence: CTC
atggagtggcctctcccact

SEQ ID NO: 17894 - DNA, 20 bp, Artificial Sequence
  Description of Artificial Sequence: Synthetic oligonucleotide
  Target: ANGPTL4; (+) strand; PAM type: YTN; PAM sequence: CTC
tcccactccaggcgagttct

SEQ ID NO: 17895 - DNA, 20 bp, Artificial Sequence
  Description of Artificial Sequence: Synthetic oligonucleotide
  Target: ANGPTL4; (+) strand; PAM type: YTN; PAM sequence: CTC
ccactccaggcgagttctgg

SEQ ID NO: 17896 - DNA, 20 bp, Artificial Sequence
  Description of Artificial Sequence: Synthetic oligonucleotide
  Target: ANGPTL4; (+) strand; PAM type: YTN; PAM sequence: CTC
caggcgagttctggctgggt

SEQ ID NO: 17897 - DNA, 20 bp, Artificial Sequence
  Description of Artificial Sequence: Synthetic oligonucleotide
  Target: ANGPTL4; (+) strand; PAM type: YTN; PAM sequence: TTC
tggctgggtctggagaaggt

SEQ ID NO: 17898 - DNA, 20 bp, Artificial Sequence
  Description of Artificial Sequence: Synthetic oligonucleotide
  Target: ANGPTL4; (+) strand; PAM type: YTN; PAM sequence: CTG
gctgggtctggagaaggtgc

SEQ ID NO: 17899 - DNA, 20 bp, Artificial Sequence
  Description of Artificial Sequence: Synthetic oligonucleotide
  Target: ANGPTL4; (+) strand; PAM type: YTN; PAM sequence: CTG
ggtctggagaaggtgcatag

SEQ ID NO: 17900 - DNA, 20 bp, Artificial Sequence
  Description of Artificial Sequence: Synthetic oligonucleotide
  Target: ANGPTL4; (+) strand; PAM type: YTN; PAM sequence: CTG
gagaaggtgcatagcatcac

SEQ ID NO: 17901 - DNA, 20 bp, Artificial Sequence
  Description of Artificial Sequence: Synthetic oligonucleotide
  Target: ANGPTL4; (+) strand; PAM type: YTN; PAM sequence: CTG
gccgtgcagctgcgggactg

SEQ ID NO: 17902 - DNA, 20 bp, Artificial Sequence
  Description of Artificial Sequence: Synthetic oligonucleotide
  Target: ANGPTL4; (+) strand; PAM type: YTN; PAM sequence: CTG
cgggactgggatggcaacgc

SEQ ID NO: 17903 - DNA, 20 bp, Artificial Sequence
  Description of Artificial Sequence: Synthetic oligonucleotide
  Target: ANGPTL4; (+) strand; PAM type: YTN; PAM sequence: CTG
ggatggcaacgccgagttgc

SEQ ID NO: 17904 - DNA, 20 bp, Artificial Sequence
  Description of Artificial Sequence: Synthetic oligonucleotide
  Target: ANGPTL4; (+) strand; PAM type: YTN; PAM sequence: TTG
ctgcagttctccgtgcacct

SEQ ID NO: 17905 - DNA, 20 bp, Artificial Sequence
  Description of Artificial Sequence: Synthetic oligonucleotide
  Target: ANGPTL4; (+) strand; PAM type: YTN; PAM sequence: CTG
cagttctccgtgcacctggg

SEQ ID NO: 17906 - DNA, 20 bp, Artificial Sequence
  Description of Artificial Sequence: Synthetic oligonucleotide
  Target: ANGPTL4; (+) strand; PAM type: YTN; PAM sequence: TTC
tccgtgcacctgggtggcga

SEQ ID NO: 17907 - DNA, 20 bp, Artificial Sequence
  Description of Artificial Sequence: Synthetic oligonucleotide
  Target: ANGPTL4; (+) strand; PAM type: YTN; PAM sequence: CTC
cgtgcacctgggtggcgagg

SEQ ID NO: 17908 - DNA, 20 bp, Artificial Sequence
  Description of Artificial Sequence: Synthetic oligonucleotide
  Target: ANGPTL4; (+) strand; PAM type: YTN; PAM sequence: CTG
ggtggcgaggacacggccta

SEQ ID NO: 17909 - DNA, 20 bp, Artificial Sequence
  Description of Artificial Sequence: Synthetic oligonucleotide
  Target: ANGPTL4; (+) strand; PAM type: YTN; PAM sequence: CTA
tagcctgcagctcactgcac

SEQ ID NO: 17910 - DNA, 20 bp, Artificial Sequence
  Description of Artificial Sequence: Synthetic oligonucleotide
  Target: ANGPTL4; (+) strand; PAM type: YTN; PAM sequence: CTG
cagctcactgcacccgtggc

SEQ ID NO: 17911 - DNA, 20 bp, Artificial Sequence
  Description of Artificial Sequence: Synthetic oligonucleotide
  Target: ANGPTL4; (+) strand; PAM type: YTN; PAM sequence: CTC
actgcacccgtggccggcca

SEQ ID NO: 17912 - DNA, 20 bp, Artificial Sequence
  Description of Artificial Sequence: Synthetic oligonucleotide
  Target: ANGPTL4; (+) strand; PAM type: YTN; PAM sequence: CTG
cacccgtggccggccagctg

SEQ ID NO: 17913 - DNA, 20 bp, Artificial Sequence
  Description of Artificial Sequence: Synthetic oligonucleotide
  Target: ANGPTL4; (+) strand; PAM type: YTN; PAM sequence: CTG
ggcgccaccaccgtcccacc

SEQ ID NO: 17914 - DNA, 20 bp, Artificial Sequence
  Description of Artificial Sequence: Synthetic oligonucleotide
  Target: ANGPTL4; (+) strand; PAM type: YTN; PAM sequence: CTC
tccgtacccttctccacttg

SEQ ID NO: 17915 - DNA, 20 bp, Artificial Sequence
  Description of Artificial Sequence: Synthetic oligonucleotide
  Target: ANGPTL4; (+) strand; PAM type: YTN; PAM sequence: CTC
cgtacccttctccacttggg

SEQ ID NO: 17916 - DNA, 20 bp, Artificial Sequence
  Description of Artificial Sequence: Synthetic oligonucleotide
  Target: ANGPTL4; (+) strand; PAM type: YTN; PAM sequence: CTT
ctccacttgggaccaggatc

SEQ ID NO: 17917 - DNA, 20 bp, Artificial Sequence
  Description of Artificial Sequence: Synthetic oligonucleotide
  Target: ANGPTL4; (+) strand; PAM type: YTN; PAM sequence: TTC
tccacttgggaccaggatca

SEQ ID NO: 17918 - DNA, 20 bp, Artificial Sequence
  Description of Artificial Sequence: Synthetic oligonucleotide
  Target: ANGPTL4; (+) strand; PAM type: YTN; PAM sequence: CTC
cacttgggaccaggatcacg

SEQ ID NO: 17919 - DNA, 20 bp, Artificial Sequence
  Description of Artificial Sequence: Synthetic oligonucleotide
  Target: ANGPTL4; (+) strand; PAM type: YTN; PAM sequence: CTT
gggaccaggatcacgacctc

SEQ ID NO: 17920 - DNA, 20 bp, Artificial Sequence
  Description of Artificial Sequence: Synthetic oligonucleotide
  Target: ANGPTL4; (+) strand; PAM type: YTN; PAM sequence: TTG
ggaccaggatcacgacctcc

SEQ ID NO: 17921 - DNA, 20 bp, Artificial Sequence
  Description of Artificial Sequence: Synthetic oligonucleotide
  Target: ANGPTL4; (+) strand; PAM type: YTN; PAM sequence: CTC
cgcagggacaagaactgcgc

SEQ ID NO: 17922 - DNA, 20 bp, Artificial Sequence
  Description of Artificial Sequence: Synthetic oligonucleotide
  Target: ANGPTL4; (+) strand; PAM type: YTN; PAM sequence: CTG
cgccaagagcctctctggtg

SEQ ID NO: 17923 - DNA, 20 bp, Artificial Sequence
  Description of Artificial Sequence: Synthetic oligonucleotide
  Target: ANGPTL4; (+) strand; PAM type: YTN; PAM sequence: CTC
tctggtgagcaggccctgcc

SEQ ID NO: 17924 - DNA, 20 bp, Artificial Sequence
  Description of Artificial Sequence: Synthetic oligonucleotide
  Target: ANGPTL4; (+) strand; PAM type: YTN; PAM sequence: CTC
tggtgagcaggccctgccat

SEQ ID NO: 17925 - DNA, 20 bp, Artificial Sequence
  Description of Artificial Sequence: Synthetic oligonucleotide
  Target: ANGPTL4; (+) strand; PAM type: YTN; PAM sequence: CTG
gtgagcaggccctgccatgc

SEQ ID NO: 17926 - DNA, 20 bp, Artificial Sequence
  Description of Artificial Sequence: Synthetic oligonucleotide
  Target: ANGPTL4; (+) strand; PAM type: YTN; PAM sequence: CTG
ccatgccacacccagccagc

SEQ ID NO: 17927 - DNA, 20 bp, Artificial Sequence
  Description of Artificial Sequence: Synthetic oligonucleotide
  Target: ANGPTL4; (+) strand; PAM type: YTN; PAM sequence: CTT
ccctccttatctttctgctg

SEQ ID NO: 17928 - DNA, 20 bp, Artificial Sequence
  Description of Artificial Sequence: Synthetic oligonucleotide
  Target: ANGPTL4; (+) strand; PAM type: YTN; PAM sequence: TTC
cctccttatctttctgctgc

SEQ ID NO: 17929 - DNA, 20 bp, Artificial Sequence
  Description of Artificial Sequence: Synthetic oligonucleotide
  Target: ANGPTL4; (+) strand; PAM type: YTN; PAM sequence: CTC
cttatctttctgctgctctg

SEQ ID NO: 17930 - DNA, 20 bp, Artificial Sequence
  Description of Artificial Sequence: Synthetic oligonucleotide
  Target: ANGPTL4; (+) strand; PAM type: YTN; PAM sequence: CTT
atctttctgctgctctgtcc

SEQ ID NO: 17931 - DNA, 20 bp, Artificial Sequence
  Description of Artificial Sequence: Synthetic oligonucleotide
  Target: ANGPTL4; (+) strand; PAM type: YTN; PAM sequence: TTA
tctttctgctgctctgtcct

SEQ ID NO: 17932 - DNA, 20 bp, Artificial Sequence
  Description of Artificial Sequence: Synthetic oligonucleotide
  Target: ANGPTL4; (+) strand; PAM type: YTN; PAM sequence: CTT
tctgctgctctgtcctgcct

SEQ ID NO: 17933 - DNA, 20 bp, Artificial Sequence
  Description of Artificial Sequence: Synthetic oligonucleotide
  Target: ANGPTL4; (+) strand; PAM type: YTN; PAM sequence: TTT
ctgctgctctgtcctgcctt

SEQ ID NO: 17934 - DNA, 20 bp, Artificial Sequence
  Description of Artificial Sequence: Synthetic oligonucleotide
  Target: ANGPTL4; (+) strand; PAM type: YTN; PAM sequence: TTC
tgctgctctgtcctgccttc

SEQ ID NO: 17935 - DNA, 20 bp, Artificial Sequence
  Description of Artificial Sequence: Synthetic oligonucleotide
  Target: ANGPTL4; (+) strand; PAM type: YTN; PAM sequence: CTG
ctgctctgtcctgccttcaa

SEQ ID NO: 17936 - DNA, 20 bp, Artificial Sequence
  Description of Artificial Sequence: Synthetic oligonucleotide
  Target: ANGPTL4; (+) strand; PAM type: YTN; PAM sequence: CTG
ctctgtcctgccttcaaccc

SEQ ID NO: 17937 - DNA, 20 bp, Artificial Sequence
  Description of Artificial Sequence: Synthetic oligonucleotide
  Target: ANGPTL4; (+) strand; PAM type: YTN; PAM sequence: CTC
tgtcctgccttcaaccccac

SEQ ID NO: 17938 - DNA, 20 bp, Artificial Sequence
  Description of Artificial Sequence: Synthetic oligonucleotide
  Target: ANGPTL4; (+) strand; PAM type: YTN; PAM sequence: CTG
tcctgccttcaaccccacat

SEQ ID NO: 17939 - DNA, 20 bp, Artificial Sequence
  Description of Artificial Sequence: Synthetic oligonucleotide
  Target: ANGPTL4; (+) strand; PAM type: YTN; PAM sequence: CTG
ccttcaaccccacattgcat

SEQ ID NO: 17940 - DNA, 20 bp, Artificial Sequence
  Description of Artificial Sequence: Synthetic oligonucleotide
  Target: ANGPTL4; (+) strand; PAM type: YTN; PAM sequence: CTT
caaccccacattgcatctgt

SEQ ID NO: 17941 - DNA, 20 bp, Artificial Sequence
  Description of Artificial Sequence: Synthetic oligonucleotide
  Target: ANGPTL4; (+) strand; PAM type: YTN; PAM sequence: TTC
aaccccacattgcatctgtt

SEQ ID NO: 17942 - DNA, 20 bp, Artificial Sequence
  Description of Artificial Sequence: Synthetic oligonucleotide
  Target: ANGPTL4; (+) strand; PAM type: YTN; PAM sequence: TTG
catctgtttcctgcccccac

SEQ ID NO: 17943 - DNA, 20 bp, Artificial Sequence
  Description of Artificial Sequence: Synthetic oligonucleotide
  Target: ANGPTL4; (+) strand; PAM type: YTN; PAM sequence: CTG
tttcctgcccccacctcttc

SEQ ID NO: 17944 - DNA, 20 bp, Artificial Sequence
  Description of Artificial Sequence: Synthetic oligonucleotide
  Target: ANGPTL4; (+) strand; PAM type: YTN; PAM sequence: TTT
cctgcccccacctcttcctt

SEQ ID NO: 17945 - DNA, 20 bp, Artificial Sequence
  Description of Artificial Sequence: Synthetic oligonucleotide
  Target: ANGPTL4; (+) strand; PAM type: YTN; PAM sequence: TTC
ctgcccccacctcttcctta

SEQ ID NO: 17946 - DNA, 20 bp, Artificial Sequence
  Description of Artificial Sequence: Synthetic oligonucleotide
  Target: ANGPTL4; (+) strand; PAM type: YTN; PAM sequence: CTG
cccccacctcttccttacat

SEQ ID NO: 17947 - DNA, 20 bp, Artificial Sequence
  Description of Artificial Sequence: Synthetic oligonucleotide
  Target: ANGPTL4; (+) strand; PAM type: YTN; PAM sequence: CTC
ttccttacatgccgtgtgtg

SEQ ID NO: 17948 - DNA, 20 bp, Artificial Sequence
  Description of Artificial Sequence: Synthetic oligonucleotide
  Target: ANGPTL4; (+) strand; PAM type: YTN; PAM sequence: CTT
ccttacatgccgtgtgtgtg

SEQ ID NO: 17949 - DNA, 20 bp, Artificial Sequence
  Description of Artificial Sequence: Synthetic oligonucleotide
  Target: ANGPTL4; (+) strand; PAM type: YTN; PAM sequence: TTC
cttacatgccgtgtgtgtga

SEQ ID NO: 17950 - DNA, 20 bp, Artificial Sequence
  Description of Artificial Sequence: Synthetic oligonucleotide
  Target: ANGPTL4; (+) strand; PAM type: YTN; PAM sequence: CTT
acatgccgtgtgtgtgattg

SEQ ID NO: 17951 - DNA, 20 bp, Artificial Sequence
  Description of Artificial Sequence: Synthetic oligonucleotide
  Target: ANGPTL4; (+) strand; PAM type: YTN; PAM sequence: TTA
catgccgtgtgtgtgattgg

SEQ ID NO: 17952 - DNA, 20 bp, Artificial Sequence
  Description of Artificial Sequence: Synthetic oligonucleotide
  Target: ANGPTL4; (+) strand; PAM type: YTN; PAM sequence: TTG
ggccactaacttagcctatc

SEQ ID NO: 17953 - DNA, 20 bp, Artificial Sequence
  Description of Artificial Sequence: Synthetic oligonucleotide
  Target: ANGPTL4; (+) strand; PAM type: YTN; PAM sequence: CTA
acttagcctatctggcctca

SEQ ID NO: 17954 - DNA, 20 bp, Artificial Sequence
  Description of Artificial Sequence: Synthetic oligonucleotide
  Target: ANGPTL4; (+) strand; PAM type: YTN; PAM sequence: CTT
agcctatctggcctcagttt

SEQ ID NO: 17955 - DNA, 20 bp, Artificial Sequence
  Description of Artificial Sequence: Synthetic oligonucleotide
  Target: ANGPTL4; (+) strand; PAM type: YTN; PAM sequence: TTA
gcctatctggcctcagtttt

SEQ ID NO: 17956 - DNA, 20 bp, Artificial Sequence
  Description of Artificial Sequence: Synthetic oligonucleotide
  Target: ANGPTL4; (+) strand; PAM type: YTN; PAM sequence: CTA
tctggcctcagttttcccat

SEQ ID NO: 17957 - DNA, 20 bp, Artificial Sequence
  Description of Artificial Sequence: Synthetic oligonucleotide
  Target: ANGPTL4; (+) strand; PAM type: YTN; PAM sequence: CTG
gcctcagttttcccatcctg

SEQ ID NO: 17958 - DNA, 20 bp, Artificial Sequence
  Description of Artificial Sequence: Synthetic oligonucleotide
  Target: ANGPTL4; (+) strand; PAM type: YTN; PAM sequence: CTC
agttttcccatcctgaaaag

SEQ ID NO: 17959 - DNA, 20 bp, Artificial Sequence
  Description of Artificial Sequence: Synthetic oligonucleotide
  Target: ANGPTL4; (+) strand; PAM type: YTN; PAM sequence: TTT
tcccatcctgaaaagggtct

SEQ ID NO: 17960 - DNA, 20 bp, Artificial Sequence
  Description of Artificial Sequence: Synthetic oligonucleotide
  Target: ANGPTL4; (+) strand; PAM type: YTN; PAM sequence: TTT
cccatcctgaaaagggtctt

SEQ ID NO: 17961 - DNA, 20 bp, Artificial Sequence
  Description of Artificial Sequence: Synthetic oligonucleotide
  Target: ANGPTL4; (+) strand; PAM type: YTN; PAM sequence: TTC
ccatcctgaaaagggtcttg

SEQ ID NO: 17962 - DNA, 20 bp, Artificial Sequence
  Description of Artificial Sequence: Synthetic oligonucleotide
  Target: ANGPTL4; (+) strand; PAM type: YTN; PAM sequence: CTG
aaaagggtcttgaccgtctt

SEQ ID NO: 17963 - DNA, 20 bp, Artificial Sequence
  Description of Artificial Sequence: Synthetic oligonucleotide
  Target: ANGPTL4; (+) strand; PAM type: YTN; PAM sequence: CTT
gaccgtctttacttttattt

SEQ ID NO: 17964 - DNA, 20 bp, Artificial Sequence
  Description of Artificial Sequence: Synthetic oligonucleotide
  Target: ANGPTL4; (+) strand; PAM type: YTN; PAM sequence: TTG
accgtctttacttttattta

SEQ ID NO: 17965 - DNA, 20 bp, Artificial Sequence
  Description of Artificial Sequence: Synthetic oligonucleotide
  Target: ANGPTL4; (+) strand; PAM type: YTN; PAM sequence: CTT
tacttttatttacttatgtg

SEQ ID NO: 17966 - DNA, 20 bp, Artificial Sequence
  Description of Artificial Sequence: Synthetic oligonucleotide
  Target: ANGPTL4; (+) strand; PAM type: YTN; PAM sequence: TTT
acttttatttacttatgtgt

SEQ ID NO: 17967 - DNA, 20 bp, Artificial Sequence
  Description of Artificial Sequence: Synthetic oligonucleotide
  Target: ANGPTL4; (+) strand; PAM type: YTN; PAM sequence: TTA
cttttatttacttatgtgtt

SEQ ID NO: 17968 - DNA, 20 bp, Artificial Sequence
  Description of Artificial Sequence: Synthetic oligonucleotide
  Target: ANGPTL4; (+) strand; PAM type: YTN; PAM sequence: CTT
ttatttacttatgtgtttgt

SEQ ID NO: 17969 - DNA, 20 bp, Artificial Sequence
  Description of Artificial Sequence: Synthetic oligonucleotide
  Target: ANGPTL4; (+) strand; PAM type: YTN; PAM sequence: TTT
tatttacttatgtgtttgtt

SEQ ID NO: 17970 - DNA, 20 bp, Artificial Sequence
  Description of Artificial Sequence: Synthetic oligonucleotide
  Target: ANGPTL4; (+) strand; PAM type: YTN; PAM sequence: TTT
atttacttatgtgtttgttt

SEQ ID NO: 17971 - DNA, 20 bp, Artificial Sequence
  Description of Artificial Sequence: Synthetic oligonucleotide
  Target: ANGPTL4; (+) strand; PAM type: YTN; PAM sequence: TTA
tttacttatgtgtttgttta

SEQ ID NO: 17972 - DNA, 20 bp, Artificial Sequence
  Description of Artificial Sequence: Synthetic oligonucleotide
  Target: ANGPTL4; (+) strand; PAM type: YTN; PAM sequence: TTT
acttatgtgtttgtttattt

SEQ ID NO: 17973 - DNA, 20 bp, Artificial Sequence
  Description of Artificial Sequence: Synthetic oligonucleotide
  Target: ANGPTL4; (+) strand; PAM type: YTN; PAM sequence: TTA
cttatgtgtttgtttattta

SEQ ID NO: 17974 - DNA, 20 bp, Artificial Sequence
  Description of Artificial Sequence: Synthetic oligonucleotide
  Target: ANGPTL4; (+) strand; PAM type: YTN; PAM sequence: CTT
atgtgtttgtttatttattt

SEQ ID NO: 17975 - DNA, 20 bp, Artificial Sequence
  Description of Artificial Sequence: Synthetic oligonucleotide
  Target: ANGPTL4; (+) strand; PAM type: YTN; PAM sequence: TTA
tgtgtttgtttatttattta

SEQ ID NO: 17976 - DNA, 20 bp, Artificial Sequence
  Description of Artificial Sequence: Synthetic oligonucleotide
  Target: ANGPTL4; (+) strand; PAM type: YTN; PAM sequence: TTT
gtttatttatttatttatgt

SEQ ID NO: 17977 - DNA, 20 bp, Artificial Sequence
  Description of Artificial Sequence: Synthetic oligonucleotide
  Target: ANGPTL4; (+) strand; PAM type: YTN; PAM sequence: TTG
tttatttatttatttatgta

SEQ ID NO: 17978 - DNA, 20 bp, Artificial Sequence
  Description of Artificial Sequence: Synthetic oligonucleotide
  Target: ANGPTL4; (+) strand; PAM type: YTN; PAM sequence: TTT
atttatttatttatgtattt

SEQ ID NO: 17979 - DNA, 20 bp, Artificial Sequence
  Description of Artificial Sequence: Synthetic oligonucleotide
  Target: ANGPTL4; (+) strand; PAM type: YTN; PAM sequence: TTA
tttatttatttatgtattta

SEQ ID NO: 17980 - DNA, 20 bp, Artificial Sequence
  Description of Artificial Sequence: Synthetic oligonucleotide
  Target: ANGPTL4; (+) strand; PAM type: YTN; PAM sequence: TTT
atttatttatgtatttattt

SEQ ID NO: 17981 - DNA, 20 bp, Artificial Sequence
  Description of Artificial Sequence: Synthetic oligonucleotide
  Target: ANGPTL4; (+) strand; PAM type: YTN; PAM sequence: TTA
tttatttatgtatttatttt

SEQ ID NO: 17982 - DNA, 20 bp, Artificial Sequence
  Description of Artificial Sequence: Synthetic oligonucleotide
  Target: ANGPTL4; (+) strand; PAM type: YTN; PAM sequence: TTT
atttatgtatttattttttg

SEQ ID NO: 17983 - DNA, 20 bp, Artificial Sequence
  Description of Artificial Sequence: Synthetic oligonucleotide
  Target: ANGPTL4; (+) strand; PAM type: YTN; PAM sequence: TTA
tttatgtatttattttttga

SEQ ID NO: 17984 - DNA, 20 bp, Artificial Sequence
  Description of Artificial Sequence: Synthetic oligonucleotide
  Target: ANGPTL4; (+) strand; PAM type: YTN; PAM sequence: TTT
atgtatttattttttgagac

SEQ ID NO: 17985 - DNA, 20 bp, Artificial Sequence
  Description of Artificial Sequence: Synthetic oligonucleotide
  Target: ANGPTL4; (+) strand; PAM type: YTN; PAM sequence: TTA
tgtatttattttttgagacg

SEQ ID NO: 17986 - DNA, 20 bp, Artificial Sequence
  Description of Artificial Sequence: Synthetic oligonucleotide
  Target: ANGPTL4; (+) strand; PAM type: YTN; PAM sequence: TTT
attttttgagacggagtctc

SEQ ID NO: 17987 - DNA, 20 bp, Artificial Sequence
  Description of Artificial Sequence: Synthetic oligonucleotide
  Target: ANGPTL4; (+) strand; PAM type: YTN; PAM sequence: TTA
ttttttgagacggagtctca

SEQ ID NO: 17988 - DNA, 20 bp, Artificial Sequence
  Description of Artificial Sequence: Synthetic oligonucleotide
  Target: ANGPTL4; (+) strand; PAM type: YTN; PAM sequence: TTT
tttgagacggagtctcactt

SEQ ID NO: 17989 - DNA, 20 bp, Artificial Sequence
  Description of Artificial Sequence: Synthetic oligonucleotide
  Target: ANGPTL4; (+) strand; PAM type: YTN; PAM sequence: TTT
ttgagacggagtctcacttt

SEQ ID NO: 17990 - DNA, 20 bp, Artificial Sequence
  Description of Artificial Sequence: Synthetic oligonucleotide
  Target: ANGPTL4; (+) strand; PAM type: YTN; PAM sequence: TTT
tgagacggagtctcactttg

SEQ ID NO: 17991 - DNA, 20 bp, Artificial Sequence
  Description of Artificial Sequence: Synthetic oligonucleotide
  Target: ANGPTL4; (+) strand; PAM type: YTN; PAM sequence: TTT
gagacggagtctcactttgt

SEQ ID NO: 17992 - DNA, 20 bp, Artificial Sequence
  Description of Artificial Sequence: Synthetic oligonucleotide
  Target: ANGPTL4; (+) strand; PAM type: YTN; PAM sequence: TTG
agacggagtctcactttgtc

SEQ ID NO: 17993 - DNA, 20 bp, Artificial Sequence
  Description of Artificial Sequence: Synthetic oligonucleotide
  Target: ANGPTL4; (+) strand; PAM type: YTN; PAM sequence: CTC
actttgtcacccaggctgga

SEQ ID NO: 17994 - DNA, 20 bp, Artificial Sequence
  Description of Artificial Sequence: Synthetic oligonucleotide
  Target: ANGPTL4; (+) strand; PAM type: YTN; PAM sequence: CTT
tgtcacccaggctggagtgc

SEQ ID NO: 17995 - DNA, 20 bp, Artificial Sequence
  Description of Artificial Sequence: Synthetic oligonucleotide
  Target: ANGPTL4; (+) strand; PAM type: YTN; PAM sequence: TTT
gtcacccaggctggagtgct

SEQ ID NO: 17996 - DNA, 20 bp, Artificial Sequence
  Description of Artificial Sequence: Synthetic oligonucleotide
  Target: ANGPTL4; (+) strand; PAM type: YTN; PAM sequence: TTG
tcacccaggctggagtgctt

SEQ ID NO: 17997 - DNA, 20 bp, Artificial Sequence
  Description of Artificial Sequence: Synthetic oligonucleotide
  Target: ANGPTL4; (+) strand; PAM type: YTN; PAM sequence: CTG
gagtgctttgtggcacgatc

SEQ ID NO: 17998 - DNA, 20 bp, Artificial Sequence
  Description of Artificial Sequence: Synthetic oligonucleotide
  Target: ANGPTL4; (+) strand; PAM type: YTN; PAM sequence: CTT
tgtggcacgatcttggctca

SEQ ID NO: 17999 - DNA, 20 bp, Artificial Sequence
  Description of Artificial Sequence: Synthetic oligonucleotide
  Target: ANGPTL4; (+) strand; PAM type: YTN; PAM sequence: TTT
gtggcacgatcttggctcac

SEQ ID NO: 18000 - DNA, 20 bp, Artificial Sequence
  Description of Artificial Sequence: Synthetic oligonucleotide
  Target: ANGPTL4; (+) strand; PAM type: YTN; PAM sequence: TTG
tggcacgatcttggctcact

SEQ ID NO: 18001 - DNA, 20 bp, Artificial Sequence
  Description of Artificial Sequence: Synthetic oligonucleotide
  Target: ANGPTL4; (+) strand; PAM type: YTN; PAM sequence: CTT
ggctcactgcaagctccacc

SEQ ID NO: 18002 - DNA, 20 bp, Artificial Sequence
  Description of Artificial Sequence: Synthetic oligonucleotide
  Target: ANGPTL4; (+) strand; PAM type: YTN; PAM sequence: TTG
gctcactgcaagctccacct

SEQ ID NO: 18003 - DNA, 20 bp, Artificial Sequence
  Description of Artificial Sequence: Synthetic oligonucleotide
  Target: ANGPTL4; (+) strand; PAM type: YTN; PAM sequence: CTC
actgcaagctccacctcctg

SEQ ID NO: 18004 - DNA, 20 bp, Artificial Sequence
  Description of Artificial Sequence: Synthetic oligonucleotide
  Target: ANGPTL4; (+) strand; PAM type: YTN; PAM sequence: CTG
caagctccacctcctgagtt

SEQ ID NO: 18005 - DNA, 20 bp, Artificial Sequence
  Description of Artificial Sequence: Synthetic oligonucleotide
  Target: ANGPTL4; (+) strand; PAM type: YTN; PAM sequence: CTC
cacctcctgagttcacacca

SEQ ID NO: 18006 - DNA, 20 bp, Artificial Sequence
  Description of Artificial Sequence: Synthetic oligonucleotide
  Target: ANGPTL4; (+) strand; PAM type: YTN; PAM sequence: CTC
ctgagttcacaccattctcc

SEQ ID NO: 18007 - DNA, 20 bp, Artificial Sequence
  Description of Artificial Sequence: Synthetic oligonucleotide
  Target: ANGPTL4; (+) strand; PAM type: YTN; PAM sequence: CTG
agttcacaccattctcctgc

SEQ ID NO: 18008 - DNA, 20 bp, Artificial Sequence
  Description of Artificial Sequence: Synthetic oligonucleotide
  Target: ANGPTL4; (+) strand; PAM type: YTN; PAM sequence: TTC
acaccattctcctgcctcag

SEQ ID NO: 18009 - DNA, 20 bp, Artificial Sequence
  Description of Artificial Sequence: Synthetic oligonucleotide
  Target: ANGPTL4; (+) strand; PAM type: YTN; PAM sequence: TTC
tcctgcctcagcctcccgag

SEQ ID NO: 18010 - DNA, 20 bp, Artificial Sequence
  Description of Artificial Sequence: Synthetic oligonucleotide
  Target: ANGPTL4; (+) strand; PAM type: YTN; PAM sequence: CTC
ctgcctcagcctcccgagta

SEQ ID NO: 18011 - DNA, 20 bp, Artificial Sequence
  Description of Artificial Sequence: Synthetic oligonucleotide
  Target: ANGPTL4; (+) strand; PAM type: YTN; PAM sequence: CTG
cctcagcctcccgagtagct

SEQ ID NO: 18012 - DNA, 20 bp, Artificial Sequence
  Description of Artificial Sequence: Synthetic oligonucleotide
  Target: ANGPTL4; (+) strand; PAM type: YTN; PAM sequence: CTC
agcctcccgagtagctggga

SEQ ID NO: 18013 - DNA, 20 bp, Artificial Sequence
  Description of Artificial Sequence: Synthetic oligonucleotide
  Target: ANGPTL4; (+) strand; PAM type: YTN; PAM sequence: CTC
ccgagtagctgggactatag

SEQ ID NO: 18014 - DNA, 20 bp, Artificial Sequence
  Description of Artificial Sequence: Synthetic oligonucleotide
  Target: ANGPTL4; (+) strand; PAM type: YTN; PAM sequence: CTG
ggactataggtgcccaccac

SEQ ID NO: 18015 - DNA, 20 bp, Artificial Sequence
  Description of Artificial Sequence: Synthetic oligonucleotide
  Target: ANGPTL4; (+) strand; PAM type: YTN; PAM sequence: CTA
taggtgcccaccaccacgcc

SEQ ID NO: 18016 - DNA, 20 bp, Artificial Sequence
  Description of Artificial Sequence: Synthetic oligonucleotide
  Target: ANGPTL4; (+) strand; PAM type: YTN; PAM sequence: CTG
gctaatttttttgtattttt

SEQ ID NO: 18017 - DNA, 20 bp, Artificial Sequence
  Description of Artificial Sequence: Synthetic oligonucleotide
  Target: ANGPTL4; (+) strand; PAM type: YTN; PAM sequence: CTA
atttttttgtatttttagta

SEQ ID NO: 18018 - DNA, 20 bp, Artificial Sequence
  Description of Artificial Sequence: Synthetic oligonucleotide
  Target: ANGPTL4; (+) strand; PAM type: YTN; PAM sequence: TTT
ttttgtatttttagtagaga

SEQ ID NO: 18019 - DNA, 20 bp, Artificial Sequence
  Description of Artificial Sequence: Synthetic oligonucleotide
  Target: ANGPTL4; (+) strand; PAM type: YTN; PAM sequence: TTT
tttgtatttttagtagagat

SEQ ID NO: 18020 - DNA, 20 bp, Artificial Sequence
  Description of Artificial Sequence: Synthetic oligonucleotide
  Target: ANGPTL4; (+) strand; PAM type: YTN; PAM sequence: TTT
ttgtatttttagtagagatg

SEQ ID NO: 18021 - DNA, 20 bp, Artificial Sequence
  Description of Artificial Sequence: Synthetic oligonucleotide
  Target: ANGPTL4; (+) strand; PAM type: YTN; PAM sequence: TTT
tgtatttttagtagagatgg

SEQ ID NO: 18022 - DNA, 20 bp, Artificial Sequence
  Description of Artificial Sequence: Synthetic oligonucleotide
  Target: ANGPTL4; (+) strand; PAM type: YTN; PAM sequence: TTT
gtatttttagtagagatggg

SEQ ID NO: 18023 - DNA, 20 bp, Artificial Sequence
  Description of Artificial Sequence: Synthetic oligonucleotide
  Target: ANGPTL4; (+) strand; PAM type: YTN; PAM sequence: TTG
tatttttagtagagatgggg

SEQ ID NO: 18024 - DNA, 20 bp, Artificial Sequence
  Description of Artificial Sequence: Synthetic oligonucleotide
  Target: ANGPTL4; (+) strand; PAM type: YTN; PAM sequence: TTT
ttagtagagatggggtttca

SEQ ID NO: 18025 - DNA, 20 bp, Artificial Sequence
  Description of Artificial Sequence: Synthetic oligonucleotide
  Target: ANGPTL4; (+) strand; PAM type: YTN; PAM sequence: TTT
tagtagagatggggtttcac

SEQ ID NO: 18026 - DNA, 20 bp, Artificial Sequence
  Description of Artificial Sequence: Synthetic oligonucleotide
  Target: ANGPTL4; (+) strand; PAM type: YTN; PAM sequence: TTT
agtagagatggggtttcacc

SEQ ID NO: 18027 - DNA, 20 bp, Artificial Sequence
  Description of Artificial Sequence: Synthetic oligonucleotide
  Target: ANGPTL4; (+) strand; PAM type: YTN; PAM sequence: TTA
gtagagatggggtttcaccg

SEQ ID NO: 18028 - DNA, 20 bp, Artificial Sequence
  Description of Artificial Sequence: Synthetic oligonucleotide
  Target: ANGPTL4; (+) strand; PAM type: YTN; PAM sequence: TTT
caccgtgttagccaggatgg

SEQ ID NO: 18029 - DNA, 20 bp, Artificial Sequence
  Description of Artificial Sequence: Synthetic oligonucleotide
  Target: ANGPTL4; (+) strand; PAM type: YTN; PAM sequence: TTC
accgtgttagccaggatggt

SEQ ID NO: 18030 - DNA, 20 bp, Artificial Sequence
  Description of Artificial Sequence: Synthetic oligonucleotide
  Target: ANGPTL4; (+) strand; PAM type: YTN; PAM sequence: TTA
gccaggatggtctcgatctc

SEQ ID NO: 18031 - DNA, 20 bp, Artificial Sequence
  Description of Artificial Sequence: Synthetic oligonucleotide
  Target: ANGPTL4; (+) strand; PAM type: YTN; PAM sequence: CTC
gatctcctgacctcgtgatc

SEQ ID NO: 18032 - DNA, 20 bp, Artificial Sequence
  Description of Artificial Sequence: Synthetic oligonucleotide
  Target: ANGPTL4; (+) strand; PAM type: YTN; PAM sequence: CTC
ctgacctcgtgatctgcctg

SEQ ID NO: 18033 - DNA, 20 bp, Artificial Sequence
  Description of Artificial Sequence: Synthetic oligonucleotide
  Target: ANGPTL4; (+) strand; PAM type: YTN; PAM sequence: CTG
acctcgtgatctgcctgcct

SEQ ID NO: 18034 - DNA, 20 bp, Artificial Sequence
  Description of Artificial Sequence: Synthetic oligonucleotide
  Target: ANGPTL4; (+) strand; PAM type: YTN; PAM sequence: CTC
gtgatctgcctgcctcagcc

SEQ ID NO: 18035 - DNA, 20 bp, Artificial Sequence
  Description of Artificial Sequence: Synthetic oligonucleotide
  Target: ANGPTL4; (+) strand; PAM type: YTN; PAM sequence: CTG
cctgcctcagcctcccaaag

SEQ ID NO: 18036 - DNA, 20 bp, Artificial Sequence
  Description of Artificial Sequence: Synthetic oligonucleotide
  Target: ANGPTL4; (+) strand; PAM type: YTN; PAM sequence: CTG
cctcagcctcccaaagtgct

SEQ ID NO: 18037 - DNA, 20 bp, Artificial Sequence
  Description of Artificial Sequence: Synthetic oligonucleotide
  Target: ANGPTL4; (+) strand; PAM type: YTN; PAM sequence: CTC
agcctcccaaagtgctggga

SEQ ID NO: 18038 - DNA, 20 bp, Artificial Sequence
  Description of Artificial Sequence: Synthetic oligonucleotide
  Target: ANGPTL4; (+) strand; PAM type: YTN; PAM sequence: CTC
ccaaagtgctgggattacag

SEQ ID NO: 18039 - DNA, 20 bp, Artificial Sequence
  Description of Artificial Sequence: Synthetic oligonucleotide
  Target: ANGPTL4; (+) strand; PAM type: YTN; PAM sequence: CTG
ggattacaggcgtgagccac

SEQ ID NO: 18040 - DNA, 20 bp, Artificial Sequence
  Description of Artificial Sequence: Synthetic oligonucleotide
  Target: ANGPTL4; (+) strand; PAM type: YTN; PAM sequence: TTA
caggcgtgagccaccgcgcc

SEQ ID NO: 18041 - DNA, 20 bp, Artificial Sequence
  Description of Artificial Sequence: Synthetic oligonucleotide
  Target: ANGPTL4; (+) strand; PAM type: YTN; PAM sequence: CTA
cttatttattttttgagaca

SEQ ID NO: 18042 - DNA, 20 bp, Artificial Sequence
  Description of Artificial Sequence: Synthetic oligonucleotide
  Target: ANGPTL4; (+) strand; PAM type: YTN; PAM sequence: CTT
atttattttttgagacagag

SEQ ID NO: 18043 - DNA, 20 bp, Artificial Sequence
  Description of Artificial Sequence: Synthetic oligonucleotide
  Target: ANGPTL4; (+) strand; PAM type: YTN; PAM sequence: TTA
tttattttttgagacagagt

SEQ ID NO: 18044 - DNA, 20 bp, Artificial Sequence
  Description of Artificial Sequence: Synthetic oligonucleotide
  Target: ANGPTL4; (+) strand; PAM type: YTN; PAM sequence: TTT
attttttgagacagagtccc

SEQ ID NO: 18045 - DNA, 20 bp, Artificial Sequence
  Description of Artificial Sequence: Synthetic oligonucleotide
  Target: ANGPTL4; (+) strand; PAM type: YTN; PAM sequence: TTA
ttttttgagacagagtcccg

SEQ ID NO: 18046 - DNA, 20 bp, Artificial Sequence
  Description of Artificial Sequence: Synthetic oligonucleotide
  Target: ANGPTL4; (+) strand; PAM type: YTN; PAM sequence: TTT
tttgagacagagtcccgctg

SEQ ID NO: 18047 - DNA, 20 bp, Artificial Sequence
  Description of Artificial Sequence: Synthetic oligonucleotide
  Target: ANGPTL4; (+) strand; PAM type: YTN; PAM sequence: TTT
ttgagacagagtcccgctgt

SEQ ID NO: 18048 - DNA, 20 bp, Artificial Sequence
  Description of Artificial Sequence: Synthetic oligonucleotide
  Target: ANGPTL4; (+) strand; PAM type: YTN; PAM sequence: TTT
tgagacagagtcccgctgtg

SEQ ID NO: 18049 - DNA, 20 bp, Artificial Sequence
  Description of Artificial Sequence: Synthetic oligonucleotide
  Target: ANGPTL4; (+) strand; PAM type: YTN; PAM sequence: TTT
gagacagagtcccgctgtgt

SEQ ID NO: 18050 - DNA, 20 bp, Artificial Sequence
  Description of Artificial Sequence: Synthetic oligonucleotide
  Target: ANGPTL4; (+) strand; PAM type: YTN; PAM sequence: TTG
agacagagtcccgctgtgtc

SEQ ID NO: 18051 - DNA, 20 bp, Artificial Sequence
  Description of Artificial Sequence: Synthetic oligonucleotide
  Target: ANGPTL4; (+) strand; PAM type: YTN; PAM sequence: CTG
tgtctcccaggctggagtgc

SEQ ID NO: 18052 - DNA, 20 bp, Artificial Sequence
  Description of Artificial Sequence: Synthetic oligonucleotide
  Target: ANGPTL4; (+) strand; PAM type: YTN; PAM sequence: CTC
ccaggctggagtgcaagtga

SEQ ID NO: 18053 - DNA, 20 bp, Artificial Sequence
  Description of Artificial Sequence: Synthetic oligonucleotide
  Target: ANGPTL4; (+) strand; PAM type: YTN; PAM sequence: CTG
gagtgcaagtgacgtgatct

SEQ ID NO: 18054 - DNA, 20 bp, Artificial Sequence
  Description of Artificial Sequence: Synthetic oligonucleotide
  Target: ANGPTL4; (+) strand; PAM type: YTN; PAM sequence: CTT
ggctcactgcagcctccgcc

SEQ ID NO: 18055 - DNA, 20 bp, Artificial Sequence
  Description of Artificial Sequence: Synthetic oligonucleotide
  Target: ANGPTL4; (+) strand; PAM type: YTN; PAM sequence: TTG
gctcactgcagcctccgcct

SEQ ID NO: 18056 - DNA, 20 bp, Artificial Sequence
  Description of Artificial Sequence: Synthetic oligonucleotide
  Target: ANGPTL4; (+) strand; PAM type: YTN; PAM sequence: CTC
actgcagcctccgcctcctg

SEQ ID NO: 18057 - DNA, 20 bp, Artificial Sequence
  Description of Artificial Sequence: Synthetic oligonucleotide
  Target: ANGPTL4; (+) strand; PAM type: YTN; PAM sequence: CTG
cagcctccgcctcctgggtt

SEQ ID NO: 18058 - DNA, 20 bp, Artificial Sequence
  Description of Artificial Sequence: Synthetic oligonucleotide
  Target: ANGPTL4; (+) strand; PAM type: YTN; PAM sequence: CTC
cgcctcctgggttcaagtga

SEQ ID NO: 18059 - DNA, 20 bp, Artificial Sequence
  Description of Artificial Sequence: Synthetic oligonucleotide
  Target: ANGPTL4; (+) strand; PAM type: YTN; PAM sequence: CTC
ctgggttcaagtgattctcc

SEQ ID NO: 18060 - DNA, 20 bp, Artificial Sequence
  Description of Artificial Sequence: Synthetic oligonucleotide
  Target: ANGPTL4; (+) strand; PAM type: YTN; PAM sequence: CTG
ggttcaagtgattctcctgc

SEQ ID NO: 18061 - DNA, 20 bp, Artificial Sequence
  Description of Artificial Sequence: Synthetic oligonucleotide
  Target: ANGPTL4; (+) strand; PAM type: YTN; PAM sequence: TTC
aagtgattctcctgcctcag

SEQ ID NO: 18062 - DNA, 20 bp, Artificial Sequence
  Description of Artificial Sequence: Synthetic oligonucleotide
  Target: ANGPTL4; (+) strand; PAM type: YTN; PAM sequence: TTC
tcctgcctcagcctcctgag

SEQ ID NO: 18063 - DNA, 20 bp, Artificial Sequence
  Description of Artificial Sequence: Synthetic oligonucleotide
  Target: ANGPTL4; (+) strand; PAM type: YTN; PAM sequence: CTC
ctgcctcagcctcctgagta

SEQ ID NO: 18064 - DNA, 20 bp, Artificial Sequence
  Description of Artificial Sequence: Synthetic oligonucleotide
  Target: ANGPTL4; (+) strand; PAM type: YTN; PAM sequence: CTG
cctcagcctcctgagtagct

SEQ ID NO: 18065 - DNA, 20 bp, Artificial Sequence
  Description of Artificial Sequence: Synthetic oligonucleotide
  Target: ANGPTL4; (+) strand; PAM type: YTN; PAM sequence: CTC
agcctcctgagtagctggga

SEQ ID NO: 18066 - DNA, 20 bp, Artificial Sequence
  Description of Artificial Sequence: Synthetic oligonucleotide
  Target: ANGPTL4; (+) strand; PAM type: YTN; PAM sequence: CTC
ctgagtagctgggattacag

SEQ ID NO: 18067 - DNA, 20 bp, Artificial Sequence
  Description of Artificial Sequence: Synthetic oligonucleotide
  Target: ANGPTL4; (+) strand; PAM type: YTN; PAM sequence: CTG
agtagctgggattacaggtt

SEQ ID NO: 18068 - DNA, 20 bp, Artificial Sequence
  Description of Artificial Sequence: Synthetic oligonucleotide
  Target: ANGPTL4; (+) strand; PAM type: YTN; PAM sequence: CTG
ggattacaggttcccgccac

SEQ ID NO: 18069 - DNA, 20 bp, Artificial Sequence
  Description of Artificial Sequence: Synthetic oligonucleotide
  Target: ANGPTL4; (+) strand; PAM type: YTN; PAM sequence: TTA
caggttcccgccaccatgca

SEQ ID NO: 18070 - DNA, 20 bp, Artificial Sequence
  Description of Artificial Sequence: Synthetic oligonucleotide
  Target: ANGPTL4; (+) strand; PAM type: YTN; PAM sequence: TTC
ccgccaccatgcacagataa

SEQ ID NO: 18071 - DNA, 20 bp, Artificial Sequence
  Description of Artificial Sequence: Synthetic oligonucleotide
  Target: ANGPTL4; (+) strand; PAM type: YTN; PAM sequence: TTG
ttttgtatttttagtagaga

SEQ ID NO: 18072 - DNA, 20 bp, Artificial Sequence
  Description of Artificial Sequence: Synthetic oligonucleotide
  Target: ANGPTL4; (+) strand; PAM type: YTN; PAM sequence: TTT
tgtatttttagtagagacgg

SEQ ID NO: 18073 - DNA, 20 bp, Artificial Sequence
  Description of Artificial Sequence: Synthetic oligonucleotide
  Target: ANGPTL4; (+) strand; PAM type: YTN; PAM sequence: TTT
gtatttttagtagagacggg

SEQ ID NO: 18074 - DNA, 20 bp, Artificial Sequence
  Description of Artificial Sequence: Synthetic oligonucleotide
  Target: ANGPTL4; (+) strand; PAM type: YTN; PAM sequence: TTG
tatttttagtagagacgggg

SEQ ID NO: 18075 - DNA, 20 bp, Artificial Sequence
  Description of Artificial Sequence: Synthetic oligonucleotide
  Target: ANGPTL4; (+) strand; PAM type: YTN; PAM sequence: TTT
ttagtagagacggggtttca

SEQ ID NO: 18076 - DNA, 20 bp, Artificial Sequence
  Description of Artificial Sequence: Synthetic oligonucleotide
  Target: ANGPTL4; (+) strand; PAM type: YTN; PAM sequence: TTT
tagtagagacggggtttcac

SEQ ID NO: 18077 - DNA, 20 bp, Artificial Sequence
  Description of Artificial Sequence: Synthetic oligonucleotide
  Target: ANGPTL4; (+) strand; PAM type: YTN; PAM sequence: TTT
agtagagacggggtttcacc

SEQ ID NO: 18078 - DNA, 20 bp, Artificial Sequence
  Description of Artificial Sequence: Synthetic oligonucleotide
  Target: ANGPTL4; (+) strand; PAM type: YTN; PAM sequence: TTA
gtagagacggggtttcacca

SEQ ID NO: 18079 - DNA, 20 bp, Artificial Sequence
  Description of Artificial Sequence: Synthetic oligonucleotide
  Target: ANGPTL4; (+) strand; PAM type: YTN; PAM sequence: TTT
caccatgttggccagggtgg

SEQ ID NO: 18080 - DNA, 20 bp, Artificial Sequence
  Description of Artificial Sequence: Synthetic oligonucleotide
  Target: ANGPTL4; (+) strand; PAM type: YTN; PAM sequence: TTC
accatgttggccagggtggt

SEQ ID NO: 18081 - DNA, 20 bp, Artificial Sequence
  Description of Artificial Sequence: Synthetic oligonucleotide
  Target: ANGPTL4; (+) strand; PAM type: YTN; PAM sequence: TTG
gccagggtggtcttgaactc

SEQ ID NO: 18082 - DNA, 20 bp, Artificial Sequence
  Description of Artificial Sequence: Synthetic oligonucleotide
  Target: ANGPTL4; (+) strand; PAM type: YTN; PAM sequence: CTT
gaactcctgacctcaagtga

SEQ ID NO: 18083 - DNA, 20 bp, Artificial Sequence
  Description of Artificial Sequence: Synthetic oligonucleotide
  Target: ANGPTL4; (+) strand; PAM type: YTN; PAM sequence: TTG
aactcctgacctcaagtgat

SEQ ID NO: 18084 - DNA, 20 bp, Artificial Sequence
  Description of Artificial Sequence: Synthetic oligonucleotide
  Target: ANGPTL4; (+) strand; PAM type: YTN; PAM sequence: CTC
ctgacctcaagtgatctgcc

SEQ ID NO: 18085 - DNA, 20 bp, Artificial Sequence
  Description of Artificial Sequence: Synthetic oligonucleotide
  Target: ANGPTL4; (+) strand; PAM type: YTN; PAM sequence: CTG
acctcaagtgatctgcccac

SEQ ID NO: 18086 - DNA, 20 bp, Artificial Sequence
  Description of Artificial Sequence: Synthetic oligonucleotide
  Target: ANGPTL4; (+) strand; PAM type: YTN; PAM sequence: CTC
aagtgatctgcccacctcgg

SEQ ID NO: 18087 - DNA, 20 bp, Artificial Sequence
  Description of Artificial Sequence: Synthetic oligonucleotide
  Target: ANGPTL4; (+) strand; PAM type: YTN; PAM sequence: CTG
cccacctcggcctcccaaag

SEQ ID NO: 18088 - DNA, 20 bp, Artificial Sequence
  Description of Artificial Sequence: Synthetic oligonucleotide
  Target: ANGPTL4; (+) strand; PAM type: YTN; PAM sequence: CTC
ggcctcccaaagtgttggga

SEQ ID NO: 18089 - DNA, 20 bp, Artificial Sequence
  Description of Artificial Sequence: Synthetic oligonucleotide
  Target: ANGPTL4; (+) strand; PAM type: YTN; PAM sequence: CTC
ccaaagtgttgggattacag

SEQ ID NO: 18090 - DNA, 20 bp, Artificial Sequence
  Description of Artificial Sequence: Synthetic oligonucleotide
  Target: ANGPTL4; (+) strand; PAM type: YTN; PAM sequence: TTG
ggattacaggcgtgagccac

SEQ ID NO: 18091 - DNA, 20 bp, Artificial Sequence
  Description of Artificial Sequence: Synthetic oligonucleotide
  Target: ANGPTL4; (+) strand; PAM type: YTN; PAM sequence: TTA
caggcgtgagccacaatacc

SEQ ID NO: 18092 - DNA, 20 bp, Artificial Sequence
  Description of Artificial Sequence: Synthetic oligonucleotide
  Target: ANGPTL4; (+) strand; PAM type: YTN; PAM sequence: CTT
tataatggtgctccacagga

SEQ ID NO: 18093 - DNA, 20 bp, Artificial Sequence
  Description of Artificial Sequence: Synthetic oligonucleotide
  Target: ANGPTL4; (+) strand; PAM type: YTN; PAM sequence: TTT
ataatggtgctccacaggat

SEQ ID NO: 18094 - DNA, 20 bp, Artificial Sequence
  Description of Artificial Sequence: Synthetic oligonucleotide
  Target: ANGPTL4; (+) strand; PAM type: YTN; PAM sequence: TTA
taatggtgctccacaggatt

SEQ ID NO: 18095 - DNA, 20 bp, Artificial Sequence
  Description of Artificial Sequence: Synthetic oligonucleotide
  Target: ANGPTL4; (+) strand; PAM type: YTN; PAM sequence: CTC
cacaggattctttttttttt

SEQ ID NO: 18096 - DNA, 20 bp, Artificial Sequence
  Description of Artificial Sequence: Synthetic oligonucleotide
  Target: ANGPTL4; (+) strand; PAM type: YTN; PAM sequence: TTC
tttttttttttttttttttg

SEQ ID NO: 18097 - DNA, 20 bp, Artificial Sequence
  Description of Artificial Sequence: Synthetic oligonucleotide
  Target: ANGPTL4; (+) strand; PAM type: YTN; PAM sequence: CTT
tttttttttttttttttgaa

SEQ ID NO: 18098 - DNA, 20 bp, Artificial Sequence
  Description of Artificial Sequence: Synthetic oligonucleotide
  Target: ANGPTL4; (+) strand; PAM type: YTN; PAM sequence: TTT
ttttttttttttttttgaaa

SEQ ID NO: 18099 - DNA, 20 bp, Artificial Sequence
  Description of Artificial Sequence: Synthetic oligonucleotide
  Target: ANGPTL4; (+) strand; PAM type: YTN; PAM sequence: TTT
tttttttttttttttgaaac

SEQ ID NO: 18100 - DNA, 20 bp, Artificial Sequence
  Description of Artificial Sequence: Synthetic oligonucleotide
  Target: ANGPTL4; (+) strand; PAM type: YTN; PAM sequence: TTT
ttttttttttttttgaaaca

SEQ ID NO: 18101 - DNA, 20 bp, Artificial Sequence
  Description of Artificial Sequence: Synthetic oligonucleotide
  Target: ANGPTL4; (+) strand; PAM type: YTN; PAM sequence: TTT
tttttttttttttgaaacag

SEQ ID NO: 18102 - DNA, 20 bp, Artificial Sequence
  Description of Artificial Sequence: Synthetic oligonucleotide
  Target: ANGPTL4; (+) strand; PAM type: YTN; PAM sequence: TTT
ttttttttttttgaaacagg

SEQ ID NO: 18103 - DNA, 20 bp, Artificial Sequence
  Description of Artificial Sequence: Synthetic oligonucleotide
  Target: ANGPTL4; (+) strand; PAM type: YTN; PAM sequence: TTT
tttttttttttgaaacaggg

SEQ ID NO: 18104 - DNA, 20 bp, Artificial Sequence
  Description of Artificial Sequence: Synthetic oligonucleotide
  Target: ANGPTL4; (+) strand; PAM type: YTN; PAM sequence: TTT
ttttttttttgaaacagggt

SEQ ID NO: 18105 - DNA, 20 bp, Artificial Sequence
  Description of Artificial Sequence: Synthetic oligonucleotide
  Target: ANGPTL4; (+) strand; PAM type: YTN; PAM sequence: TTT
tttttttttgaaacagggtc

SEQ ID NO: 18106 - DNA, 20 bp, Artificial Sequence
  Description of Artificial Sequence: Synthetic oligonucleotide
  Target: ANGPTL4; (+) strand; PAM type: YTN; PAM sequence: TTT
ttttttttgaaacagggtct

SEQ ID NO: 18107 - DNA, 20 bp, Artificial Sequence
  Description of Artificial Sequence: Synthetic oligonucleotide
  Target: ANGPTL4; (+) strand; PAM type: YTN; PAM sequence: TTT
tttttttgaaacagggtctc

SEQ ID NO: 18108 - DNA, 20 bp, Artificial Sequence
  Description of Artificial Sequence: Synthetic oligonucleotide
  Target: ANGPTL4; (+) strand; PAM type: YTN; PAM sequence: TTT
ttttttgaaacagggtctca

SEQ ID NO: 18109 - DNA, 20 bp, Artificial Sequence
  Description of Artificial Sequence: Synthetic oligonucleotide
  Target: ANGPTL4; (+) strand; PAM type: YTN; PAM sequence: TTT
tttttgaaacagggtctcac

SEQ ID NO: 18110 - DNA, 20 bp, Artificial Sequence
  Description of Artificial Sequence: Synthetic oligonucleotide
  Target: ANGPTL4; (+) strand; PAM type: YTN; PAM sequence: TTT
ttttgaaacagggtctcact

SEQ ID NO: 18111 - DNA, 20 bp, Artificial Sequence
  Description of Artificial Sequence: Synthetic oligonucleotide
  Target: ANGPTL4; (+) strand; PAM type: YTN; PAM sequence: TTT
tttgaaacagggtctcactc

SEQ ID NO: 18112 - DNA, 20 bp, Artificial Sequence
  Description of Artificial Sequence: Synthetic oligonucleotide
  Target: ANGPTL4; (+) strand; PAM type: YTN; PAM sequence: TTT
ttgaaacagggtctcactct

SEQ ID NO: 18113 - DNA, 20 bp, Artificial Sequence
  Description of Artificial Sequence: Synthetic oligonucleotide
  Target: ANGPTL4; (+) strand; PAM type: YTN; PAM sequence: TTT
tgaaacagggtctcactctg

SEQ ID NO: 18114 - DNA, 20 bp, Artificial Sequence
  Description of Artificial Sequence: Synthetic oligonucleotide
  Target: ANGPTL4; (+) strand; PAM type: YTN; PAM sequence: TTT
gaaacagggtctcactctgt

SEQ ID NO: 18115 - DNA, 20 bp, Artificial Sequence
  Description of Artificial Sequence: Synthetic oligonucleotide
  Target: ANGPTL4; (+) strand; PAM type: YTN; PAM sequence: TTG
aaacagggtctcactctgtt

SEQ ID NO: 18116 - DNA, 20 bp, Artificial Sequence
  Description of Artificial Sequence: Synthetic oligonucleotide
  Target: ANGPTL4; (+) strand; PAM type: YTN; PAM sequence: CTC
actctgttgcctaagctgga

SEQ ID NO: 18117 - DNA, 20 bp, Artificial Sequence
  Description of Artificial Sequence: Synthetic oligonucleotide
  Target: ANGPTL4; (+) strand; PAM type: YTN; PAM sequence: CTC
tgttgcctaagctggagtgc

SEQ ID NO: 18118 - DNA, 20 bp, Artificial Sequence
  Description of Artificial Sequence: Synthetic oligonucleotide
  Target: ANGPTL4; (+) strand; PAM type: YTN; PAM sequence: CTG
ttgcctaagctggagtgcag

SEQ ID NO: 18119 - DNA, 20 bp, Artificial Sequence
  Description of Artificial Sequence: Synthetic oligonucleotide
  Target: ANGPTL4; (+) strand; PAM type: YTN; PAM sequence: TTG
cctaagctggagtgcagtgg

SEQ ID NO: 18120 - DNA, 20 bp, Artificial Sequence
  Description of Artificial Sequence: Synthetic oligonucleotide
  Target: ANGPTL4; (+) strand; PAM type: YTN; PAM sequence: CTA
agctggagtgcagtggtgcg

SEQ ID NO: 18121 - DNA, 20 bp, Artificial Sequence
  Description of Artificial Sequence: Synthetic oligonucleotide
  Target: ANGPTL4; (+) strand; PAM type: YTN; PAM sequence: CTG
gagtgcagtggtgcgatctc

SEQ ID NO: 18122 - DNA, 20 bp, Artificial Sequence
  Description of Artificial Sequence: Synthetic oligonucleotide
  Target: ANGPTL4; (+) strand; PAM type: YTN; PAM sequence: CTC
ggctcactgcaacctccacc

SEQ ID NO: 18123 - DNA, 20 bp, Artificial Sequence
  Description of Artificial Sequence: Synthetic oligonucleotide
  Target: ANGPTL4; (+) strand; PAM type: YTN; PAM sequence: CTC
actgcaacctccacctcccg

SEQ ID NO: 18124 - DNA, 20 bp, Artificial Sequence
  Description of Artificial Sequence: Synthetic oligonucleotide
  Target: ANGPTL4; (+) strand; PAM type: YTN; PAM sequence: CTG
caacctccacctcccgggtt

SEQ ID NO: 18125 - DNA, 20 bp, Artificial Sequence
  Description of Artificial Sequence: Synthetic oligonucleotide
  Target: ANGPTL4; (+) strand; PAM type: YTN; PAM sequence: CTC
cacctcccgggttcaagcaa

SEQ ID NO: 18126 - DNA, 20 bp, Artificial Sequence
  Description of Artificial Sequence: Synthetic oligonucleotide
  Target: ANGPTL4; (+) strand; PAM type: YTN; PAM sequence: CTC
ccgggttcaagcaattctca

SEQ ID NO: 18127 - DNA, 20 bp, Artificial Sequence
  Description of Artificial Sequence: Synthetic oligonucleotide
  Target: ANGPTL4; (+) strand; PAM type: YTN; PAM sequence: TTC
aagcaattctcaaaaaaaaa

SEQ ID NO: 18128 - DNA, 20 bp, Artificial Sequence
  Description of Artificial Sequence: Synthetic oligonucleotide
  Target: ANGPTL4; (+) strand; PAM type: YTN; PAM sequence: TTC
tcaaaaaaaaaaaaaaatta

SEQ ID NO: 18129 - DNA, 20 bp, Artificial Sequence
  Description of Artificial Sequence: Synthetic oligonucleotide
  Target: ANGPTL4; (+) strand; PAM type: YTN; PAM sequence: CTC
aaaaaaaaaaaaaaattagg

SEQ ID NO: 18130 - DNA, 20 bp, Artificial Sequence
  Description of Artificial Sequence: Synthetic oligonucleotide
  Target: ANGPTL4; (+) strand; PAM type: YTN; PAM sequence: TTA
ggcacggtggctcacacttg

SEQ ID NO: 18131 - DNA, 20 bp, Artificial Sequence
  Description of Artificial Sequence: Synthetic oligonucleotide
  Target: ANGPTL4; (+) strand; PAM type: YTN; PAM sequence: CTC
acacttgcaatcccagcact

SEQ ID NO: 18132 - DNA, 20 bp, Artificial Sequence
  Description of Artificial Sequence: Synthetic oligonucleotide
  Target: ANGPTL4; (+) strand; PAM type: YTN; PAM sequence: CTT
gcaatcccagcactttggga

SEQ ID NO: 18133 - DNA, 20 bp, Artificial Sequence
  Description of Artificial Sequence: Synthetic oligonucleotide
  Target: ANGPTL4; (+) strand; PAM type: YTN; PAM sequence: TTG
caatcccagcactttgggag

SEQ ID NO: 18134 - DNA, 20 bp, Artificial Sequence
  Description of Artificial Sequence: Synthetic oligonucleotide
  Target: ANGPTL4; (+) strand; PAM type: YTN; PAM sequence: CTT
tgggaggctgaagcgagtgg

SEQ ID NO: 18135 - DNA, 20 bp, Artificial Sequence
  Description of Artificial Sequence: Synthetic oligonucleotide
  Target: ANGPTL4; (+) strand; PAM type: YTN; PAM sequence: TTT
gggaggctgaagcgagtgga

SEQ ID NO: 18136 - DNA, 20 bp, Artificial Sequence
  Description of Artificial Sequence: Synthetic oligonucleotide
  Target: ANGPTL4; (+) strand; PAM type: YTN; PAM sequence: TTG
ggaggctgaagcgagtggat

SEQ ID NO: 18137 - DNA, 20 bp, Artificial Sequence
  Description of Artificial Sequence: Synthetic oligonucleotide
  Target: ANGPTL4; (+) strand; PAM type: YTN; PAM sequence: CTG
aagcgagtggatcacttgag

SEQ ID NO: 18138 - DNA, 20 bp, Artificial Sequence
  Description of Artificial Sequence: Synthetic oligonucleotide
  Target: ANGPTL4; (+) strand; PAM type: YTN; PAM sequence: CTT
gagcccaggagaccaatctg

SEQ ID NO: 18139 - DNA, 20 bp, Artificial Sequence
  Description of Artificial Sequence: Synthetic oligonucleotide
  Target: ANGPTL4; (+) strand; PAM type: YTN; PAM sequence: TTG
agcccaggagaccaatctga

SEQ ID NO: 18140 - DNA, 20 bp, Artificial Sequence
  Description of Artificial Sequence: Synthetic oligonucleotide
  Target: ANGPTL4; (+) strand; PAM type: YTN; PAM sequence: CTG
agcaacagggcgaaatcctg

SEQ ID NO: 18141 - DNA, 20 bp, Artificial Sequence
  Description of Artificial Sequence: Synthetic oligonucleotide
  Target: ANGPTL4; (+) strand; PAM type: YTN; PAM sequence: CTG
tctcaattaaaaatacaaaa

SEQ ID NO: 18142 - DNA, 20 bp, Artificial Sequence
  Description of Artificial Sequence: Synthetic oligonucleotide
  Target: ANGPTL4; (+) strand; PAM type: YTN; PAM sequence: CTC
aattaaaaatacaaaaaact

SEQ ID NO: 18143 - DNA, 20 bp, Artificial Sequence
  Description of Artificial Sequence: Synthetic oligonucleotide
  Target: ANGPTL4; (+) strand; PAM type: YTN; PAM sequence: TTA
aaaatacaaaaaactagctg

SEQ ID NO: 18144 - DNA, 20 bp, Artificial Sequence
  Description of Artificial Sequence: Synthetic oligonucleotide
  Target: ANGPTL4; (+) strand; PAM type: YTN; PAM sequence: CTA
gctgggcatggtggtgcctg

SEQ ID NO: 18145 - DNA, 20 bp, Artificial Sequence
  Description of Artificial Sequence: Synthetic oligonucleotide
  Target: ANGPTL4; (+) strand; PAM type: YTN; PAM sequence: CTG
ggcatggtggtgcctgcctg

SEQ ID NO: 18146 - DNA, 20 bp, Artificial Sequence
  Description of Artificial Sequence: Synthetic oligonucleotide
  Target: ANGPTL4; (+) strand; PAM type: YTN; PAM sequence: CTG
cctgtgttcccatctacttg

SEQ ID NO: 18147 - DNA, 20 bp, Artificial Sequence
  Description of Artificial Sequence: Synthetic oligonucleotide
  Target: ANGPTL4; (+) strand; PAM type: YTN; PAM sequence: CTG
tgttcccatctacttgggag

SEQ ID NO: 18148 - DNA, 20 bp, Artificial Sequence
  Description of Artificial Sequence: Synthetic oligonucleotide
  Target: ANGPTL4; (+) strand; PAM type: YTN; PAM sequence: TTC
ccatctacttgggaggctga

SEQ ID NO: 18149 - DNA, 20 bp, Artificial Sequence
  Description of Artificial Sequence: Synthetic oligonucleotide
  Target: ANGPTL4; (+) strand; PAM type: YTN; PAM sequence: CTA
cttgggaggctgagttggga

SEQ ID NO: 18150 - DNA, 20 bp, Artificial Sequence
  Description of Artificial Sequence: Synthetic oligonucleotide
  Target: ANGPTL4; (+) strand; PAM type: YTN; PAM sequence: CTT
gggaggctgagttgggagga

SEQ ID NO: 18151 - DNA, 20 bp, Artificial Sequence
  Description of Artificial Sequence: Synthetic oligonucleotide
  Target: ANGPTL4; (+) strand; PAM type: YTN; PAM sequence: TTG
ggaggctgagttgggaggat

SEQ ID NO: 18152 - DNA, 20 bp, Artificial Sequence
  Description of Artificial Sequence: Synthetic oligonucleotide
  Target: ANGPTL4; (+) strand; PAM type: YTN; PAM sequence: CTG
agttgggaggatctcttgag

SEQ ID NO: 18153 - DNA, 20 bp, Artificial Sequence
  Description of Artificial Sequence: Synthetic oligonucleotide
  Target: ANGPTL4; (+) strand; PAM type: YTN; PAM sequence: TTG
ggaggatctcttgagcctag

SEQ ID NO: 18154 - DNA, 20 bp, Artificial Sequence
  Description of Artificial Sequence: Synthetic oligonucleotide
  Target: ANGPTL4; (+) strand; PAM type: YTN; PAM sequence: CTC
ttgagcctaggagataaggc

SEQ ID NO: 18155 - DNA, 20 bp, Artificial Sequence
  Description of Artificial Sequence: Synthetic oligonucleotide
  Target: ANGPTL4; (+) strand; PAM type: YTN; PAM sequence: CTT
gagcctaggagataaggctg

SEQ ID NO: 18156 - DNA, 20 bp, Artificial Sequence
  Description of Artificial Sequence: Synthetic oligonucleotide
  Target: ANGPTL4; (+) strand; PAM type: YTN; PAM sequence: TTG
agcctaggagataaggctgc

SEQ ID NO: 18157 - DNA, 20 bp, Artificial Sequence
  Description of Artificial Sequence: Synthetic oligonucleotide
  Target: ANGPTL4; (+) strand; PAM type: YTN; PAM sequence: CTA
ggagataaggctgcagtgag

SEQ ID NO: 18158 - DNA, 20 bp, Artificial Sequence
  Description of Artificial Sequence: Synthetic oligonucleotide
  Target: ANGPTL4; (+) strand; PAM type: YTN; PAM sequence: CTG
cagtgagctgagactgcgcc

SEQ ID NO: 18159 - DNA, 20 bp, Artificial Sequence
  Description of Artificial Sequence: Synthetic oligonucleotide
  Target: ANGPTL4; (+) strand; PAM type: YTN; PAM sequence: CTG
agactgcgccactgcactca

SEQ ID NO: 18160 - DNA, 20 bp, Artificial Sequence
  Description of Artificial Sequence: Synthetic oligonucleotide
  Target: ANGPTL4; (+) strand; PAM type: YTN; PAM sequence: CTG
cgccactgcactcaagcctg

SEQ ID NO: 18161 - DNA, 20 bp, Artificial Sequence
  Description of Artificial Sequence: Synthetic oligonucleotide
  Target: ANGPTL4; (+) strand; PAM type: YTN; PAM sequence: CTG
cactcaagcctgggtgacag

SEQ ID NO: 18162 - DNA, 20 bp, Artificial Sequence
  Description of Artificial Sequence: Synthetic oligonucleotide
  Target: ANGPTL4; (+) strand; PAM type: YTN; PAM sequence: CTC
aagcctgggtgacagagtga

SEQ ID NO: 18163 - DNA, 20 bp, Artificial Sequence
  Description of Artificial Sequence: Synthetic oligonucleotide
  Target: ANGPTL4; (+) strand; PAM type: YTN; PAM sequence: CTG
ggtgacagagtgagacccct

SEQ ID NO: 18164 - DNA, 20 bp, Artificial Sequence
  Description of Artificial Sequence: Synthetic oligonucleotide
  Target: ANGPTL4; (+) strand; PAM type: YTN; PAM sequence: CTG
cctcaaaagaaaaagaaaaa

SEQ ID NO: 18165 - DNA, 20 bp, Artificial Sequence
  Description of Artificial Sequence: Synthetic oligonucleotide
  Target: ANGPTL4; (+) strand; PAM type: YTN; PAM sequence: CTC
aaaagaaaaagaaaaaatgc

SEQ ID NO: 18166 - DNA, 20 bp, Artificial Sequence
  Description of Artificial Sequence: Synthetic oligonucleotide
  Target: ANGPTL4; (+) strand; PAM type: YTN; PAM sequence: CTC
acacctgtggtcccagctac

SEQ ID NO: 18167 - DNA, 20 bp, Artificial Sequence
  Description of Artificial Sequence: Synthetic oligonucleotide
  Target: ANGPTL4; (+) strand; PAM type: YTN; PAM sequence: CTG
tggtcccagctacttgggag

SEQ ID NO: 18168 - DNA, 20 bp, Artificial Sequence
  Description of Artificial Sequence: Synthetic oligonucleotide
  Target: ANGPTL4; (+) strand; PAM type: YTN; PAM sequence: CTA
cttgggaggcccaggtacaa

SEQ ID NO: 18169 - DNA, 20 bp, Artificial Sequence
  Description of Artificial Sequence: Synthetic oligonucleotide
  Target: ANGPTL4; (+) strand; PAM type: YTN; PAM sequence: CTT
gggaggcccaggtacaagaa

SEQ ID NO: 18170 - DNA, 20 bp, Artificial Sequence
  Description of Artificial Sequence: Synthetic oligonucleotide
  Target: ANGPTL4; (+) strand; PAM type: YTN; PAM sequence: TTG
ggaggcccaggtacaagaat

SEQ ID NO: 18171 - DNA, 20 bp, Artificial Sequence
  Description of Artificial Sequence: Synthetic oligonucleotide
  Target: ANGPTL4; (+) strand; PAM type: YTN; PAM sequence: CTT
gagcccgtaaggttgacgct

SEQ ID NO: 18172 - DNA, 20 bp, Artificial Sequence
  Description of Artificial Sequence: Synthetic oligonucleotide
  Target: ANGPTL4; (+) strand; PAM type: YTN; PAM sequence: TTG
agcccgtaaggttgacgctg

SEQ ID NO: 18173 - DNA, 20 bp, Artificial Sequence
  Description of Artificial Sequence: Synthetic oligonucleotide
  Target: ANGPTL4; (+) strand; PAM type: YTN; PAM sequence: TTG
acgctgcattgagccatcac

SEQ ID NO: 18174 - DNA, 20 bp, Artificial Sequence
  Description of Artificial Sequence: Synthetic oligonucleotide
  Target: ANGPTL4; (+) strand; PAM type: YTN; PAM sequence: CTG
cattgagccatcaccacacc

SEQ ID NO: 18175 - DNA, 20 bp, Artificial Sequence
  Description of Artificial Sequence: Synthetic oligonucleotide
  Target: ANGPTL4; (+) strand; PAM type: YTN; PAM sequence: TTG
agccatcaccacaccactgc

SEQ ID NO: 18176 - DNA, 20 bp, Artificial Sequence
  Description of Artificial Sequence: Synthetic oligonucleotide
  Target: ANGPTL4; (+) strand; PAM type: YTN; PAM sequence: CTG
cactccagcctgggcaatgg

SEQ ID NO: 18177 - DNA, 20 bp, Artificial Sequence
  Description of Artificial Sequence: Synthetic oligonucleotide
  Target: ANGPTL4; (+) strand; PAM type: YTN; PAM sequence: CTC
cagcctgggcaatggagcca

SEQ ID NO: 18178 - DNA, 20 bp, Artificial Sequence
  Description of Artificial Sequence: Synthetic oligonucleotide
  Target: ANGPTL4; (+) strand; PAM type: YTN; PAM sequence: CTG
ggcaatggagccaggccctg

SEQ ID NO: 18179 - DNA, 20 bp, Artificial Sequence
  Description of Artificial Sequence: Synthetic oligonucleotide
  Target: ANGPTL4; (+) strand; PAM type: YTN; PAM sequence: CTG
tctcaaaaaaaattgttttt

SEQ ID NO: 18180 - DNA, 20 bp, Artificial Sequence
  Description of Artificial Sequence: Synthetic oligonucleotide
  Target: ANGPTL4; (+) strand; PAM type: YTN; PAM sequence: CTC
aaaaaaaattgtttttaaac

SEQ ID NO: 18181 - DNA, 20 bp, Artificial Sequence
  Description of Artificial Sequence: Synthetic oligonucleotide
  Target: ANGPTL4; (+) strand; PAM type: YTN; PAM sequence: TTG
tttttaaacttaaaaataag

SEQ ID NO: 18182 - DNA, 20 bp, Artificial Sequence
  Description of Artificial Sequence: Synthetic oligonucleotide
  Target: ANGPTL4; (+) strand; PAM type: YTN; PAM sequence: TTT
ttaaacttaaaaataaggcc

SEQ ID NO: 18183 - DNA, 20 bp, Artificial Sequence
  Description of Artificial Sequence: Synthetic oligonucleotide
  Target: ANGPTL4; (+) strand; PAM type: YTN; PAM sequence: TTT
taaacttaaaaataaggccg

SEQ ID NO: 18184 - DNA, 20 bp, Artificial Sequence
  Description of Artificial Sequence: Synthetic oligonucleotide
  Target: ANGPTL4; (+) strand; PAM type: YTN; PAM sequence: TTT
aaacttaaaaataaggccgg

SEQ ID NO: 18185 - DNA, 20 bp, Artificial Sequence
  Description of Artificial Sequence: Synthetic oligonucleotide
  Target: ANGPTL4; (+) strand; PAM type: YTN; PAM sequence: TTA
aacttaaaaataaggccggg

SEQ ID NO: 18186 - DNA, 20 bp, Artificial Sequence
  Description of Artificial Sequence: Synthetic oligonucleotide
  Target: ANGPTL4; (+) strand; PAM type: YTN; PAM sequence: CTT
aaaaataaggccgggtgtgg

SEQ ID NO: 18187 - DNA, 20 bp, Artificial Sequence
  Description of Artificial Sequence: Synthetic oligonucleotide
  Target: ANGPTL4; (+) strand; PAM type: YTN; PAM sequence: TTA
aaaataaggccgggtgtggg

SEQ ID NO: 18188 - DNA, 20 bp, Artificial Sequence
  Description of Artificial Sequence: Synthetic oligonucleotide
  Target: ANGPTL4; (+) strand; PAM type: YTN; PAM sequence: CTC
acacctgtaatcccagcact

SEQ ID NO: 18189 - DNA, 20 bp, Artificial Sequence
  Description of Artificial Sequence: Synthetic oligonucleotide
  Target: ANGPTL4; (+) strand; PAM type: YTN; PAM sequence: CTG
taatcccagcactttgggag

SEQ ID NO: 18190 - DNA, 20 bp, Artificial Sequence
  Description of Artificial Sequence: Synthetic oligonucleotide
  Target: ANGPTL4; (+) strand; PAM type: YTN; PAM sequence: CTT
tgggaggccgaggtgggtgg

SEQ ID NO: 18191 - DNA, 20 bp, Artificial Sequence
  Description of Artificial Sequence: Synthetic oligonucleotide
  Target: ANGPTL4; (+) strand; PAM type: YTN; PAM sequence: TTT
gggaggccgaggtgggtgga

SEQ ID NO: 18192 - DNA, 20 bp, Artificial Sequence
  Description of Artificial Sequence: Synthetic oligonucleotide
  Target: ANGPTL4; (+) strand; PAM type: YTN; PAM sequence: TTG
ggaggccgaggtgggtggat

SEQ ID NO: 18193 - DNA, 20 bp, Artificial Sequence
  Description of Artificial Sequence: Synthetic oligonucleotide
  Target: ANGPTL4; (+) strand; PAM type: YTN; PAM sequence: CTG
aggtcaggagttcaaaacta

SEQ ID NO: 18194 - DNA, 20 bp, Artificial Sequence
  Description of Artificial Sequence: Synthetic oligonucleotide
  Target: ANGPTL4; (+) strand; PAM type: YTN; PAM sequence: TTC
aaaactagcctggccaacat

SEQ ID NO: 18195 - DNA, 20 bp, Artificial Sequence
  Description of Artificial Sequence: Synthetic oligonucleotide
  Target: ANGPTL4; (+) strand; PAM type: YTN; PAM sequence: CTA
gcctggccaacatggtgaaa

SEQ ID NO: 18196 - DNA, 20 bp, Artificial Sequence
  Description of Artificial Sequence: Synthetic oligonucleotide
  Target: ANGPTL4; (+) strand; PAM type: YTN; PAM sequence: CTG
gccaacatggtgaaaccctg

SEQ ID NO: 18197 - DNA, 20 bp, Artificial Sequence
  Description of Artificial Sequence: Synthetic oligonucleotide
  Target: ANGPTL4; (+) strand; PAM type: YTN; PAM sequence: CTG
tctctactaaaaatacaaaa

SEQ ID NO: 18198 - DNA, 20 bp, Artificial Sequence
  Description of Artificial Sequence: Synthetic oligonucleotide
  Target: ANGPTL4; (+) strand; PAM type: YTN; PAM sequence: CTC
tactaaaaatacaaaaatta

SEQ ID NO: 18199 - DNA, 20 bp, Artificial Sequence
  Description of Artificial Sequence: Synthetic oligonucleotide
  Target: ANGPTL4; (+) strand; PAM type: YTN; PAM sequence: CTA
ctaaaaatacaaaaattagg

SEQ ID NO: 18200 - DNA, 20 bp, Artificial Sequence
  Description of Artificial Sequence: Synthetic oligonucleotide
  Target: ANGPTL4; (+) strand; PAM type: YTN; PAM sequence: CTA
aaaatacaaaaattaggcca

SEQ ID NO: 18201 - DNA, 20 bp, Artificial Sequence
  Description of Artificial Sequence: Synthetic oligonucleotide
  Target: ANGPTL4; (+) strand; PAM type: YTN; PAM sequence: TTA
ggccaggcgcagtgggtcat

SEQ ID NO: 18202 - DNA, 20 bp, Artificial Sequence
  Description of Artificial Sequence: Synthetic oligonucleotide
  Target: ANGPTL4; (+) strand; PAM type: YTN; PAM sequence: CTG
taatcccagcactttgggag

SEQ ID NO: 18203 - DNA, 20 bp, Artificial Sequence
  Description of Artificial Sequence: Synthetic oligonucleotide
  Target: ANGPTL4; (+) strand; PAM type: YTN; PAM sequence: CTT
tgggaggctgaggagggtgg

SEQ ID NO: 18204 - DNA, 20 bp, Artificial Sequence
  Description of Artificial Sequence: Synthetic oligonucleotide
  Target: ANGPTL4; (+) strand; PAM type: YTN; PAM sequence: TTT
gggaggctgaggagggtgga

SEQ ID NO: 18205 - DNA, 20 bp, Artificial Sequence
  Description of Artificial Sequence: Synthetic oligonucleotide
  Target: ANGPTL4; (+) strand; PAM type: YTN; PAM sequence: TTG
ggaggctgaggagggtggat

SEQ ID NO: 18206 - DNA, 20 bp, Artificial Sequence
  Description of Artificial Sequence: Synthetic oligonucleotide
  Target: ANGPTL4; (+) strand; PAM type: YTN; PAM sequence: CTG
aggagggtggatcacatgag

SEQ ID NO: 18207 - DNA, 20 bp, Artificial Sequence
  Description of Artificial Sequence: Synthetic oligonucleotide
  Target: ANGPTL4; (+) strand; PAM type: YTN; PAM sequence: TTT
gagaccaacctggccaacat

SEQ ID NO: 18208 - DNA, 20 bp, Artificial Sequence
  Description of Artificial Sequence: Synthetic oligonucleotide
  Target: ANGPTL4; (+) strand; PAM type: YTN; PAM sequence: TTG
agaccaacctggccaacatg

SEQ ID NO: 18209 - DNA, 20 bp, Artificial Sequence
  Description of Artificial Sequence: Synthetic oligonucleotide
  Target: ANGPTL4; (+) strand; PAM type: YTN; PAM sequence: CTG
gccaacatggtgaaaccccc

SEQ ID NO: 18210 - DNA, 20 bp, Artificial Sequence
  Description of Artificial Sequence: Synthetic oligonucleotide
  Target: ANGPTL4; (+) strand; PAM type: YTN; PAM sequence: CTC
actactaaaaatacaaaaac

SEQ ID NO: 18211 - DNA, 20 bp, Artificial Sequence
  Description of Artificial Sequence: Synthetic oligonucleotide
  Target: ANGPTL4; (+) strand; PAM type: YTN; PAM sequence: CTA
ctaaaaatacaaaaactagc

SEQ ID NO: 18212 - DNA, 20 bp, Artificial Sequence
  Description of Artificial Sequence: Synthetic oligonucleotide
  Target: ANGPTL4; (+) strand; PAM type: YTN; PAM sequence: CTA
aaaatacaaaaactagccag

SEQ ID NO: 18213 - DNA, 20 bp, Artificial Sequence
  Description of Artificial Sequence: Synthetic oligonucleotide
  Target: ANGPTL4; (+) strand; PAM type: YTN; PAM sequence: CTA
gccaggcgtggtggcgggtg

SEQ ID NO: 18214 - DNA, 20 bp, Artificial Sequence
  Description of Artificial Sequence: Synthetic oligonucleotide
  Target: ANGPTL4; (+) strand; PAM type: YTN; PAM sequence: CTG
taatcccggctactcaggag

SEQ ID NO: 18215 - DNA, 20 bp, Artificial Sequence
  Description of Artificial Sequence: Synthetic oligonucleotide
  Target: ANGPTL4; (+) strand; PAM type: YTN; PAM sequence: CTA
ctcaggaggctgaggcatga

SEQ ID NO: 18216 - DNA, 20 bp, Artificial Sequence
  Description of Artificial Sequence: Synthetic oligonucleotide
  Target: ANGPTL4; (+) strand; PAM type: YTN; PAM sequence: CTC
aggaggctgaggcatgagaa

SEQ ID NO: 18217 - DNA, 20 bp, Artificial Sequence
  Description of Artificial Sequence: Synthetic oligonucleotide
  Target: ANGPTL4; (+) strand; PAM type: YTN; PAM sequence: CTG
aggcatgagaatcccttgaa

SEQ ID NO: 18218 - DNA, 20 bp, Artificial Sequence
  Description of Artificial Sequence: Synthetic oligonucleotide
  Target: ANGPTL4; (+) strand; PAM type: YTN; PAM sequence: CTT
gaacctgggaggcagaggtg

SEQ ID NO: 18219 - DNA, 20 bp, Artificial Sequence
  Description of Artificial Sequence: Synthetic oligonucleotide
  Target: ANGPTL4; (+) strand; PAM type: YTN; PAM sequence: TTG
aacctgggaggcagaggtgc

SEQ ID NO: 18220 - DNA, 20 bp, Artificial Sequence
  Description of Artificial Sequence: Synthetic oligonucleotide
  Target: ANGPTL4; (+) strand; PAM type: YTN; PAM sequence: CTG
ggaggcagaggtgcagtgag

SEQ ID NO: 18221 - DNA, 20 bp, Artificial Sequence
  Description of Artificial Sequence: Synthetic oligonucleotide
  Target: ANGPTL4; (+) strand; PAM type: YTN; PAM sequence: TTG
tgccactgcactccagcctg

SEQ ID NO: 18222 - DNA, 20 bp, Artificial Sequence
  Description of Artificial Sequence: Synthetic oligonucleotide
  Target: ANGPTL4; (+) strand; PAM type: YTN; PAM sequence: CTG
cactccagcctgggagatag

SEQ ID NO: 18223 - DNA, 20 bp, Artificial Sequence
  Description of Artificial Sequence: Synthetic oligonucleotide
  Target: ANGPTL4; (+) strand; PAM type: YTN; PAM sequence: CTC
cagcctgggagatagagtga

SEQ ID NO: 18224 - DNA, 20 bp, Artificial Sequence
  Description of Artificial Sequence: Synthetic oligonucleotide
  Target: ANGPTL4; (+) strand; PAM type: YTN; PAM sequence: CTG
ggagatagagtgagactcag

SEQ ID NO: 18225 - DNA, 20 bp, Artificial Sequence
  Description of Artificial Sequence: Synthetic oligonucleotide
  Target: ANGPTL4; (+) strand; PAM type: YTN; PAM sequence: CTC
agtctcaaaaaaaaagacca

SEQ ID NO: 18226 - DNA, 20 bp, Artificial Sequence
  Description of Artificial Sequence: Synthetic oligonucleotide
  Target: ANGPTL4; (+) strand; PAM type: YTN; PAM sequence: CTC
aaaaaaaaagaccaaaaatt

SEQ ID NO: 18227 - DNA, 20 bp, Artificial Sequence
  Description of Artificial Sequence: Synthetic oligonucleotide
  Target: ANGPTL4; (+) strand; PAM type: YTN; PAM sequence: TTA
gccaggtgtggtggcaggcg

SEQ ID NO: 18228 - DNA, 20 bp, Artificial Sequence
  Description of Artificial Sequence: Synthetic oligonucleotide
  Target: ANGPTL4; (+) strand; PAM type: YTN; PAM sequence: CTG
taatcccagctactcgggag

SEQ ID NO: 18229 - DNA, 20 bp, Artificial Sequence
  Description of Artificial Sequence: Synthetic oligonucleotide
  Target: ANGPTL4; (+) strand; PAM type: YTN; PAM sequence: CTA
ctcgggaggctgagggagga

SEQ ID NO: 18230 - DNA, 20 bp, Artificial Sequence
  Description of Artificial Sequence: Synthetic oligonucleotide
  Target: ANGPTL4; (+) strand; PAM type: YTN; PAM sequence: CTC
gggaggctgagggaggagaa

SEQ ID NO: 18231 - DNA, 20 bp, Artificial Sequence
  Description of Artificial Sequence: Synthetic oligonucleotide
  Target: ANGPTL4; (+) strand; PAM type: YTN; PAM sequence: CTG
agggaggagaatcacttaaa

SEQ ID NO: 18232 - DNA, 20 bp, Artificial Sequence
  Description of Artificial Sequence: Synthetic oligonucleotide
  Target: ANGPTL4; (+) strand; PAM type: YTN; PAM sequence: CTT
aaacctgagagacggaggtt

SEQ ID NO: 18233 - DNA, 20 bp, Artificial Sequence
  Description of Artificial Sequence: Synthetic oligonucleotide
  Target: ANGPTL4; (+) strand; PAM type: YTN; PAM sequence: TTA
aacctgagagacggaggttg

SEQ ID NO: 18234 - DNA, 20 bp, Artificial Sequence
  Description of Artificial Sequence: Synthetic oligonucleotide
  Target: ANGPTL4; (+) strand; PAM type: YTN; PAM sequence: CTG
agagacggaggttgcagtga

SEQ ID NO: 18235 - DNA, 20 bp, Artificial Sequence
  Description of Artificial Sequence: Synthetic oligonucleotide
  Target: ANGPTL4; (+) strand; PAM type: YTN; PAM sequence: TTG
cagtgagctgagatcgcacc

SEQ ID NO: 18236 - DNA, 20 bp, Artificial Sequence
  Description of Artificial Sequence: Synthetic oligonucleotide
  Target: ANGPTL4; (+) strand; PAM type: YTN; PAM sequence: CTG
agatcgcaccactgcactcc

SEQ ID NO: 18237 - DNA, 20 bp, Artificial Sequence
  Description of Artificial Sequence: Synthetic oligonucleotide
  Target: ANGPTL4; (+) strand; PAM type: YTN; PAM sequence: CTG
cactccagcctgggtgacag

SEQ ID NO: 18238 - DNA, 20 bp, Artificial Sequence
  Description of Artificial Sequence: Synthetic oligonucleotide
  Target: ANGPTL4; (+) strand; PAM type: YTN; PAM sequence: CTC
cagcctgggtgacagagtaa

SEQ ID NO: 18239 - DNA, 20 bp, Artificial Sequence
  Description of Artificial Sequence: Synthetic oligonucleotide
  Target: ANGPTL4; (+) strand; PAM type: YTN; PAM sequence: CTG
ggtgacagagtaagactcaa

SEQ ID NO: 18240 - DNA, 20 bp, Artificial Sequence
  Description of Artificial Sequence: Synthetic oligonucleotide
  Target: ANGPTL4; (+) strand; PAM type: YTN; PAM sequence: CTC
aatctcaaaaaaaaaaaagt

SEQ ID NO: 18241 - DNA, 20 bp, Artificial Sequence
  Description of Artificial Sequence: Synthetic oligonucleotide
  Target: ANGPTL4; (+) strand; PAM type: YTN; PAM sequence: CTC
aaaaaaaaaaaagtcaagtc

SEQ ID NO: 18242 - DNA, 20 bp, Artificial Sequence
  Description of Artificial Sequence: Synthetic oligonucleotide
  Target: ANGPTL4; (+) strand; PAM type: YTN; PAM sequence: CTG
gtccccaacctgcctcatcc

SEQ ID NO: 18243 - DNA, 20 bp, Artificial Sequence
  Description of Artificial Sequence: Synthetic oligonucleotide
  Target: ANGPTL4; (+) strand; PAM type: YTN; PAM sequence: CTG
cctcatcctcaaccctatcc

SEQ ID NO: 18244 - DNA, 20 bp, Artificial Sequence
  Description of Artificial Sequence: Synthetic oligonucleotide
  Target: ANGPTL4; (+) strand; PAM type: YTN; PAM sequence: CTC
atcctcaaccctatccctat

SEQ ID NO: 18245 - DNA, 20 bp, Artificial Sequence
  Description of Artificial Sequence: Synthetic oligonucleotide
  Target: ANGPTL4; (+) strand; PAM type: YTN; PAM sequence: CTC
aaccctatccctatctcctt

SEQ ID NO: 18246 - DNA, 20 bp, Artificial Sequence
  Description of Artificial Sequence: Synthetic oligonucleotide
  Target: ANGPTL4; (+) strand; PAM type: YTN; PAM sequence: CTA
tccctatctcctttcagccc

SEQ ID NO: 18247 - DNA, 20 bp, Artificial Sequence
  Description of Artificial Sequence: Synthetic oligonucleotide
  Target: ANGPTL4; (+) strand; PAM type: YTN; PAM sequence: CTA
tctcctttcagccccatcgg

SEQ ID NO: 18248 - DNA, 20 bp, Artificial Sequence
  Description of Artificial Sequence: Synthetic oligonucleotide
  Target: ANGPTL4; (+) strand; PAM type: YTN; PAM sequence: CTC
ctttcagccccatcggtggc

SEQ ID NO: 18249 - DNA, 20 bp, Artificial Sequence
  Description of Artificial Sequence: Synthetic oligonucleotide
  Target: ANGPTL4; (+) strand; PAM type: YTN; PAM sequence: CTT
tcagccccatcggtggctca

SEQ ID NO: 18250 - DNA, 20 bp, Artificial Sequence
  Description of Artificial Sequence: Synthetic oligonucleotide
  Target: ANGPTL4; (+) strand; PAM type: YTN; PAM sequence: TTT
cagccccatcggtggctcaa

SEQ ID NO: 18251 - DNA, 20 bp, Artificial Sequence
  Description of Artificial Sequence: Synthetic oligonucleotide
  Target: ANGPTL4; (+) strand; PAM type: YTN; PAM sequence: TTC
agccccatcggtggctcaaa

SEQ ID NO: 18252 - DNA, 20 bp, Artificial Sequence
  Description of Artificial Sequence: Synthetic oligonucleotide
  Target: ANGPTL4; (+) strand; PAM type: YTN; PAM sequence: CTC
aaagacctgaccatgttccc

SEQ ID NO: 18253 - DNA, 20 bp, Artificial Sequence
  Description of Artificial Sequence: Synthetic oligonucleotide
  Target: ANGPTL4; (+) strand; PAM type: YTN; PAM sequence: CTG
accatgttccctctcccctg

SEQ ID NO: 18254 - DNA, 20 bp, Artificial Sequence
  Description of Artificial Sequence: Synthetic oligonucleotide
  Target: ANGPTL4; (+) strand; PAM type: YTN; PAM sequence: TTC
cctctcccctgaccccggca

SEQ ID NO: 18255 - DNA, 20 bp, Artificial Sequence
  Description of Artificial Sequence: Synthetic oligonucleotide
  Target: ANGPTL4; (+) strand; PAM type: YTN; PAM sequence: CTC
tcccctgaccccggcaggag

SEQ ID NO: 18256 - DNA, 20 bp, Artificial Sequence
  Description of Artificial Sequence: Synthetic oligonucleotide
  Target: ANGPTL4; (+) strand; PAM type: YTN; PAM sequence: CTC
ccctgaccccggcaggaggc

SEQ ID NO: 18257 - DNA, 20 bp, Artificial Sequence
  Description of Artificial Sequence: Synthetic oligonucleotide
  Target: ANGPTL4; (+) strand; PAM type: YTN; PAM sequence: CTG
accccggcaggaggctggtg

SEQ ID NO: 18258 - DNA, 20 bp, Artificial Sequence
  Description of Artificial Sequence: Synthetic oligonucleotide
  Target: ANGPTL4; (+) strand; PAM type: YTN; PAM sequence: CTG
gtggtttggcacctgcagcc

SEQ ID NO: 18259 - DNA, 20 bp, Artificial Sequence
  Description of Artificial Sequence: Synthetic oligonucleotide
  Target: ANGPTL4; (+) strand; PAM type: YTN; PAM sequence: TTT
ggcacctgcagccattccaa

SEQ ID NO: 18260 - DNA, 20 bp, Artificial Sequence
  Description of Artificial Sequence: Synthetic oligonucleotide
  Target: ANGPTL4; (+) strand; PAM type: YTN; PAM sequence: TTG
gcacctgcagccattccaac

SEQ ID NO: 18261 - DNA, 20 bp, Artificial Sequence
  Description of Artificial Sequence: Synthetic oligonucleotide
  Target: ANGPTL4; (+) strand; PAM type: YTN; PAM sequence: CTG
cagccattccaacctcaacg

SEQ ID NO: 18262 - DNA, 20 bp, Artificial Sequence
  Description of Artificial Sequence: Synthetic oligonucleotide
  Target: ANGPTL4; (+) strand; PAM type: YTN; PAM sequence: TTC
caacctcaacggccagtact

SEQ ID NO: 18263 - DNA, 20 bp, Artificial Sequence
  Description of Artificial Sequence: Synthetic oligonucleotide
  Target: ANGPTL4; (+) strand; PAM type: YTN; PAM sequence: CTC
aacggccagtacttccgctc

SEQ ID NO: 18264 - DNA, 20 bp, Artificial Sequence
  Description of Artificial Sequence: Synthetic oligonucleotide
  Target: ANGPTL4; (+) strand; PAM type: YTN; PAM sequence: CTT
ccgctccatcccacagcagc

SEQ ID NO: 18265 - DNA, 20 bp, Artificial Sequence
  Description of Artificial Sequence: Synthetic oligonucleotide
  Target: ANGPTL4; (+) strand; PAM type: YTN; PAM sequence: TTC
cgctccatcccacagcagcg

SEQ ID NO: 18266 - DNA, 20 bp, Artificial Sequence
  Description of Artificial Sequence: Synthetic oligonucleotide
  Target: ANGPTL4; (+) strand; PAM type: YTN; PAM sequence: CTC
catcccacagcagcggcaga

SEQ ID NO: 18267 - DNA, 20 bp, Artificial Sequence
  Description of Artificial Sequence: Synthetic oligonucleotide
  Target: ANGPTL4; (+) strand; PAM type: YTN; PAM sequence: CTT
aagaagggaatcttctggaa

SEQ ID NO: 18268 - DNA, 20 bp, Artificial Sequence
  Description of Artificial Sequence: Synthetic oligonucleotide
  Target: ANGPTL4; (+) strand; PAM type: YTN; PAM sequence: TTA
agaagggaatcttctggaag

SEQ ID NO: 18269 - DNA, 20 bp, Artificial Sequence
  Description of Artificial Sequence: Synthetic oligonucleotide
  Target: ANGPTL4; (+) strand; PAM type: YTN; PAM sequence: CTT
ctggaagacctggcggggcc

SEQ ID NO: 18270 - DNA, 20 bp, Artificial Sequence
  Description of Artificial Sequence: Synthetic oligonucleotide
  Target: ANGPTL4; (+) strand; PAM type: YTN; PAM sequence: TTC
tggaagacctggcggggccg

SEQ ID NO: 18271 - DNA, 20 bp, Artificial Sequence
  Description of Artificial Sequence: Synthetic oligonucleotide
  Target: ANGPTL4; (+) strand; PAM type: YTN; PAM sequence: CTG
gaagacctggcggggccgct

SEQ ID NO: 18272 - DNA, 20 bp, Artificial Sequence
  Description of Artificial Sequence: Synthetic oligonucleotide
  Target: ANGPTL4; (+) strand; PAM type: YTN; PAM sequence: CTG
gcggggccgctactacccgc

SEQ ID NO: 18273 - DNA, 20 bp, Artificial Sequence
  Description of Artificial Sequence: Synthetic oligonucleotide
  Target: ANGPTL4; (+) strand; PAM type: YTN; PAM sequence: CTA
ctacccgctgcaggccacca

SEQ ID NO: 18274 - DNA, 20 bp, Artificial Sequence
  Description of Artificial Sequence: Synthetic oligonucleotide
  Target: ANGPTL4; (+) strand; PAM type: YTN; PAM sequence: CTA
cccgctgcaggccaccacca

SEQ ID NO: 18275 - DNA, 20 bp, Artificial Sequence
  Description of Artificial Sequence: Synthetic oligonucleotide
  Target: ANGPTL4; (+) strand; PAM type: YTN; PAM sequence: CTG
caggccaccaccatgttgat

SEQ ID NO: 18276 - DNA, 20 bp, Artificial Sequence
  Description of Artificial Sequence: Synthetic oligonucleotide
  Target: ANGPTL4; (+) strand; PAM type: YTN; PAM sequence: TTG
atccagcccatggcagcaga

SEQ ID NO: 18277 - DNA, 20 bp, Artificial Sequence
  Description of Artificial Sequence: Synthetic oligonucleotide
  Target: ANGPTL4; (+) strand; PAM type: YTN; PAM sequence: CTC
ctagcgtcctggctgggcct

SEQ ID NO: 18278 - DNA, 20 bp, Artificial Sequence
  Description of Artificial Sequence: Synthetic oligonucleotide
  Target: ANGPTL4; (+) strand; PAM type: YTN; PAM sequence: CTA
gcgtcctggctgggcctggt

SEQ ID NO: 18279 - DNA, 20 bp, Artificial Sequence
  Description of Artificial Sequence: Synthetic oligonucleotide
  Target: ANGPTL4; (+) strand; PAM type: YTN; PAM sequence: CTG
gctgggcctggtcccaggcc

SEQ ID NO: 18280 - DNA, 20 bp, Artificial Sequence
  Description of Artificial Sequence: Synthetic oligonucleotide
  Target: ANGPTL4; (+) strand; PAM type: YTN; PAM sequence: CTG
ggcctggtcccaggcccacg

SEQ ID NO: 18281 - DNA, 20 bp, Artificial Sequence
  Description of Artificial Sequence: Synthetic oligonucleotide
  Target: ANGPTL4; (+) strand; PAM type: YTN; PAM sequence: CTG
gtcccaggcccacgaaagac

SEQ ID NO: 18282 - DNA, 20 bp, Artificial Sequence
  Description of Artificial Sequence: Synthetic oligonucleotide
  Target: ANGPTL4; (+) strand; PAM type: YTN; PAM sequence: CTC
ttggctctgcccgaggatgt

SEQ ID NO: 18283 - DNA, 20 bp, Artificial Sequence
  Description of Artificial Sequence: Synthetic oligonucleotide
  Target: ANGPTL4; (+) strand; PAM type: YTN; PAM sequence: CTT
ggctctgcccgaggatgtgg

SEQ ID NO: 18284 - DNA, 20 bp, Artificial Sequence
  Description of Artificial Sequence: Synthetic oligonucleotide
  Target: ANGPTL4; (+) strand; PAM type: YTN; PAM sequence: TTG
gctctgcccgaggatgtggc

SEQ ID NO: 18285 - DNA, 20 bp, Artificial Sequence
  Description of Artificial Sequence: Synthetic oligonucleotide
  Target: ANGPTL4; (+) strand; PAM type: YTN; PAM sequence: CTC
tgcccgaggatgtggccgtt

SEQ ID NO: 18286 - DNA, 20 bp, Artificial Sequence
  Description of Artificial Sequence: Synthetic oligonucleotide
  Target: ANGPTL4; (+) strand; PAM type: YTN; PAM sequence: CTG
cccgaggatgtggccgttcc

SEQ ID NO: 18287 - DNA, 20 bp, Artificial Sequence
  Description of Artificial Sequence: Synthetic oligonucleotide
  Target: ANGPTL4; (+) strand; PAM type: YTN; PAM sequence: TTC
cctgcctgggcaggggctcc

SEQ ID NO: 18288 - DNA, 20 bp, Artificial Sequence
  Description of Artificial Sequence: Synthetic oligonucleotide
  Target: ANGPTL4; (+) strand; PAM type: YTN; PAM sequence: CTG
cctgggcaggggctccaagg

SEQ ID NO: 18289 - DNA, 20 bp, Artificial Sequence
  Description of Artificial Sequence: Synthetic oligonucleotide
  Target: ANGPTL4; (+) strand; PAM type: YTN; PAM sequence: CTG
ggcaggggctccaaggaggg

SEQ ID NO: 18290 - DNA, 20 bp, Artificial Sequence
  Description of Artificial Sequence: Synthetic oligonucleotide
  Target: ANGPTL4; (+) strand; PAM type: YTN; PAM sequence: CTC
caaggaggggccatctggaa

SEQ ID NO: 18291 - DNA, 20 bp, Artificial Sequence
  Description of Artificial Sequence: Synthetic oligonucleotide
  Target: ANGPTL4; (+) strand; PAM type: YTN; PAM sequence: CTG
gaaacttgtggacagagaag

SEQ ID NO: 18292 - DNA, 20 bp, Artificial Sequence
  Description of Artificial Sequence: Synthetic oligonucleotide
  Target: ANGPTL4; (+) strand; PAM type: YTN; PAM sequence: CTT
gtggacagagaagaagacca

SEQ ID NO: 18293 - DNA, 20 bp, Artificial Sequence
  Description of Artificial Sequence: Synthetic oligonucleotide
  Target: ANGPTL4; (+) strand; PAM type: YTN; PAM sequence: TTG
tggacagagaagaagaccac

SEQ ID NO: 18294 - DNA, 20 bp, Artificial Sequence
  Description of Artificial Sequence: Synthetic oligonucleotide
  Target: ANGPTL4; (+) strand; PAM type: YTN; PAM sequence: CTG
gagaagccccctttctgagt

SEQ ID NO: 18295 - DNA, 20 bp, Artificial Sequence
  Description of Artificial Sequence: Synthetic oligonucleotide
  Target: ANGPTL4; (+) strand; PAM type: YTN; PAM sequence: CTT
tctgagtgcaggggggctgc

SEQ ID NO: 18296 - DNA, 20 bp, Artificial Sequence
  Description of Artificial Sequence: Synthetic oligonucleotide
  Target: ANGPTL4; (+) strand; PAM type: YTN; PAM sequence: TTT
ctgagtgcaggggggctgca

SEQ ID NO: 18297 - DNA, 20 bp, Artificial Sequence
  Description of Artificial Sequence: Synthetic oligonucleotide
  Target: ANGPTL4; (+) strand; PAM type: YTN; PAM sequence: TTC
tgagtgcaggggggctgcat

SEQ ID NO: 18298 - DNA, 20 bp, Artificial Sequence
  Description of Artificial Sequence: Synthetic oligonucleotide
  Target: ANGPTL4; (+) strand; PAM type: YTN; PAM sequence: CTG
agtgcaggggggctgcatgc

SEQ ID NO: 18299 - DNA, 20 bp, Artificial Sequence
  Description of Artificial Sequence: Synthetic oligonucleotide
  Target: ANGPTL4; (+) strand; PAM type: YTN; PAM sequence: CTG
catgcgttgcctcctgagat

SEQ ID NO: 18300 - DNA, 20 bp, Artificial Sequence
  Description of Artificial Sequence: Synthetic oligonucleotide
  Target: ANGPTL4; (+) strand; PAM type: YTN; PAM sequence: TTG
cctcctgagatcgaggctgc

SEQ ID NO: 18301 - DNA, 20 bp, Artificial Sequence
  Description of Artificial Sequence: Synthetic oligonucleotide
  Target: ANGPTL4; (+) strand; PAM type: YTN; PAM sequence: CTC
ctgagatcgaggctgcagga

SEQ ID NO: 18302 - DNA, 20 bp, Artificial Sequence
  Description of Artificial Sequence: Synthetic oligonucleotide
  Target: ANGPTL4; (+) strand; PAM type: YTN; PAM sequence: CTG
agatcgaggctgcaggatat

SEQ ID NO: 18303 - DNA, 20 bp, Artificial Sequence
  Description of Artificial Sequence: Synthetic oligonucleotide
  Target: ANGPTL4; (+) strand; PAM type: YTN; PAM sequence: CTG
caggatatgctcagactcta

SEQ ID NO: 18304 - DNA, 20 bp, Artificial Sequence
  Description of Artificial Sequence: Synthetic oligonucleotide
  Target: ANGPTL4; (+) strand; PAM type: YTN; PAM sequence: CTC
agactctagaggcgtggacc

SEQ ID NO: 18305 - DNA, 20 bp, Artificial Sequence
  Description of Artificial Sequence: Synthetic oligonucleotide
  Target: ANGPTL4; (+) strand; PAM type: YTN; PAM sequence: CTC
tagaggcgtggaccaagggg

SEQ ID NO: 18306 - DNA, 20 bp, Artificial Sequence
  Description of Artificial Sequence: Synthetic oligonucleotide
  Target: ANGPTL4; (+) strand; PAM type: YTN; PAM sequence: CTA
gaggcgtggaccaaggggca

SEQ ID NO: 18307 - DNA, 20 bp, Artificial Sequence
  Description of Artificial Sequence: Synthetic oligonucleotide
  Target: ANGPTL4; (+) strand; PAM type: YTN; PAM sequence: CTT
cactccttgctggccaggga

SEQ ID NO: 18308 - DNA, 20 bp, Artificial Sequence
  Description of Artificial Sequence: Synthetic oligonucleotide
  Target: ANGPTL4; (+) strand; PAM type: YTN; PAM sequence: TTC
actccttgctggccagggag

SEQ ID NO: 18309 - DNA, 20 bp, Artificial Sequence
  Description of Artificial Sequence: Synthetic oligonucleotide
  Target: ANGPTL4; (+) strand; PAM type: YTN; PAM sequence: CTC
cttgctggccagggagttgg

SEQ ID NO: 18310 - DNA, 20 bp, Artificial Sequence
  Description of Artificial Sequence: Synthetic oligonucleotide
  Target: ANGPTL4; (+) strand; PAM type: YTN; PAM sequence: CTT
gctggccagggagttgggga

SEQ ID NO: 18311 - DNA, 20 bp, Artificial Sequence
  Description of Artificial Sequence: Synthetic oligonucleotide
  Target: ANGPTL4; (+) strand; PAM type: YTN; PAM sequence: TTG
ctggccagggagttggggac

SEQ ID NO: 18312 - DNA, 20 bp, Artificial Sequence
  Description of Artificial Sequence: Synthetic oligonucleotide
  Target: ANGPTL4; (+) strand; PAM type: YTN; PAM sequence: CTG
gccagggagttggggactca

SEQ ID NO: 18313 - DNA, 20 bp, Artificial Sequence
  Description of Artificial Sequence: Synthetic oligonucleotide
  Target: ANGPTL4; (+) strand; PAM type: YTN; PAM sequence: TTG
gggactcagagggaccactt

SEQ ID NO: 18314 - DNA, 20 bp, Artificial Sequence
  Description of Artificial Sequence: Synthetic oligonucleotide
  Target: ANGPTL4; (+) strand; PAM type: YTN; PAM sequence: CTC
agagggaccacttggggcca

SEQ ID NO: 18315 - DNA, 20 bp, Artificial Sequence
  Description of Artificial Sequence: Synthetic oligonucleotide
  Target: ANGPTL4; (+) strand; PAM type: YTN; PAM sequence: CTT
ggggccagccagactggcct

SEQ ID NO: 18316 - DNA, 20 bp, Artificial Sequence
  Description of Artificial Sequence: Synthetic oligonucleotide
  Target: ANGPTL4; (+) strand; PAM type: YTN; PAM sequence: TTG
gggccagccagactggcctc

SEQ ID NO: 18317 - DNA, 20 bp, Artificial Sequence
  Description of Artificial Sequence: Synthetic oligonucleotide
  Target: ANGPTL4; (+) strand; PAM type: YTN; PAM sequence: CTG
gcctcaatggcggactcagt

SEQ ID NO: 18318 - DNA, 20 bp, Artificial Sequence
  Description of Artificial Sequence: Synthetic oligonucleotide
  Target: ANGPTL4; (+) strand; PAM type: YTN; PAM sequence: CTC
aatggcggactcagtcacat

SEQ ID NO: 18319 - DNA, 20 bp, Artificial Sequence
  Description of Artificial Sequence: Synthetic oligonucleotide
  Target: ANGPTL4; (+) strand; PAM type: YTN; PAM sequence: CTC
agtcacattgactgacgggg

SEQ ID NO: 18320 - DNA, 20 bp, Artificial Sequence
  Description of Artificial Sequence: Synthetic oligonucleotide
  Target: ANGPTL4; (+) strand; PAM type: YTN; PAM sequence: TTG
actgacggggaccagggctt

SEQ ID NO: 18321 - DNA, 20 bp, Artificial Sequence
  Description of Artificial Sequence: Synthetic oligonucleotide
  Target: ANGPTL4; (+) strand; PAM type: YTN; PAM sequence: CTG
acggggaccagggcttgtgt

SEQ ID NO: 18322 - DNA, 20 bp, Artificial Sequence
  Description of Artificial Sequence: Synthetic oligonucleotide
  Target: ANGPTL4; (+) strand; PAM type: YTN; PAM sequence: CTT
gtgtgggtcgagagcgccct

SEQ ID NO: 18323 - DNA, 20 bp, Artificial Sequence
  Description of Artificial Sequence: Synthetic oligonucleotide
  Target: ANGPTL4; (+) strand; PAM type: YTN; PAM sequence: TTG
tgtgggtcgagagcgccctc

SEQ ID NO: 18324 - DNA, 20 bp, Artificial Sequence
  Description of Artificial Sequence: Synthetic oligonucleotide
  Target: ANGPTL4; (+) strand; PAM type: YTN; PAM sequence: CTC
atggtgctggtgctgttgtg

SEQ ID NO: 18325 - DNA, 20 bp, Artificial Sequence
  Description of Artificial Sequence: Synthetic oligonucleotide
  Target: ANGPTL4; (+) strand; PAM type: YTN; PAM sequence: CTG
gtgctgttgtgtgtaggtcc

SEQ ID NO: 18326 - DNA, 20 bp, Artificial Sequence
  Description of Artificial Sequence: Synthetic oligonucleotide
  Target: ANGPTL4; (+) strand; PAM type: YTN; PAM sequence: CTG
ttgtgtgtaggtcccctggg

SEQ ID NO: 18327 - DNA, 20 bp, Artificial Sequence
  Description of Artificial Sequence: Synthetic oligonucleotide
  Target: ANGPTL4; (+) strand; PAM type: YTN; PAM sequence: TTG
tgtgtaggtcccctggggac

SEQ ID NO: 18328 - DNA, 20 bp, Artificial Sequence
  Description of Artificial Sequence: Synthetic oligonucleotide
  Target: ANGPTL4; (+) strand; PAM type: YTN; PAM sequence: CTG
gggacacaagcaggcgccaa

SEQ ID NO: 18329 - DNA, 20 bp, Artificial Sequence
  Description of Artificial Sequence: Synthetic oligonucleotide
  Target: ANGPTL4; (+) strand; PAM type: YTN; PAM sequence: CTG
ggcggagctcacagagttct

SEQ ID NO: 18330 - DNA, 20 bp, Artificial Sequence
  Description of Artificial Sequence: Synthetic oligonucleotide
  Target: ANGPTL4; (+) strand; PAM type: YTN; PAM sequence: CTC
acagagttcttggaataaaa

SEQ ID NO: 18331 - DNA, 20 bp, Artificial Sequence
  Description of Artificial Sequence: Synthetic oligonucleotide
  Target: ANGPTL4; (+) strand; PAM type: YTN; PAM sequence: TTC
ttggaataaaagcaacctca

SEQ ID NO: 18332 - DNA, 20 bp, Artificial Sequence
  Description of Artificial Sequence: Synthetic oligonucleotide
  Target: ANGPTL4; (+) strand; PAM type: YTN; PAM sequence: CTT
ggaataaaagcaacctcaga

SEQ ID NO: 18333 - DNA, 20 bp, Artificial Sequence
  Description of Artificial Sequence: Synthetic oligonucleotide
  Target: ANGPTL4; (+) strand; PAM type: YTN; PAM sequence: TTG
gaataaaagcaacctcagaa

SEQ ID NO: 18334 - DNA, 20 bp, Artificial Sequence
  Description of Artificial Sequence: Synthetic oligonucleotide
  Target: ANGPTL4; (+) strand; PAM type: YTN; PAM sequence: CTC
agaacactttgttctttgtt

SEQ ID NO: 18335 - DNA, 20 bp, Artificial Sequence
  Description of Artificial Sequence: Synthetic oligonucleotide
  Target: ANGPTL4; (+) strand; PAM type: YTN; PAM sequence: CTT
tgttctttgttcttgtttgt

SEQ ID NO: 18336 - DNA, 20 bp, Artificial Sequence
  Description of Artificial Sequence: Synthetic oligonucleotide
  Target: ANGPTL4; (+) strand; PAM type: YTN; PAM sequence: TTT
gttctttgttcttgtttgtt

SEQ ID NO: 18337 - DNA, 20 bp, Artificial Sequence
  Description of Artificial Sequence: Synthetic oligonucleotide
  Target: ANGPTL4; (+) strand; PAM type: YTN; PAM sequence: TTG
ttctttgttcttgtttgttt

SEQ ID NO: 18338 - DNA, 20 bp, Artificial Sequence
  Description of Artificial Sequence: Synthetic oligonucleotide
  Target: ANGPTL4; (+) strand; PAM type: YTN; PAM sequence: TTC
tttgttcttgtttgttttct

SEQ ID NO: 18339 - DNA, 20 bp, Artificial Sequence
  Description of Artificial Sequence: Synthetic oligonucleotide
  Target: ANGPTL4; (+) strand; PAM type: YTN; PAM sequence: CTT
tgttcttgtttgttttcttt

SEQ ID NO: 18340 - DNA, 20 bp, Artificial Sequence
  Description of Artificial Sequence: Synthetic oligonucleotide
  Target: ANGPTL4; (+) strand; PAM type: YTN; PAM sequence: TTT
gttcttgtttgttttctttc

SEQ ID NO: 18341 - DNA, 20 bp, Artificial Sequence
  Description of Artificial Sequence: Synthetic oligonucleotide
  Target: ANGPTL4; (+) strand; PAM type: YTN; PAM sequence: TTG
ttcttgtttgttttctttct

SEQ ID NO: 18342 - DNA, 20 bp, Artificial Sequence
  Description of Artificial Sequence: Synthetic oligonucleotide
  Target: ANGPTL4; (+) strand; PAM type: YTN; PAM sequence: TTC
ttgtttgttttctttctttt

SEQ ID NO: 18343 - DNA, 20 bp, Artificial Sequence
  Description of Artificial Sequence: Synthetic oligonucleotide
  Target: ANGPTL4; (+) strand; PAM type: YTN; PAM sequence: CTT
gtttgttttctttctttttt

SEQ ID NO: 18344 - DNA, 20 bp, Artificial Sequence
  Description of Artificial Sequence: Synthetic oligonucleotide
  Target: ANGPTL4; (+) strand; PAM type: YTN; PAM sequence: TTG
tttgttttctttcttttttt

SEQ ID NO: 18345 - DNA, 20 bp, Artificial Sequence
  Description of Artificial Sequence: Synthetic oligonucleotide
  Target: ANGPTL4; (+) strand; PAM type: YTN; PAM sequence: TTT
gttttctttcttttttttct

SEQ ID NO: 18346 - DNA, 20 bp, Artificial Sequence
  Description of Artificial Sequence: Synthetic oligonucleotide
  Target: ANGPTL4; (+) strand; PAM type: YTN; PAM sequence: TTG
ttttctttcttttttttctc

SEQ ID NO: 18347 - DNA, 20 bp, Artificial Sequence
  Description of Artificial Sequence: Synthetic oligonucleotide
  Target: ANGPTL4; (+) strand; PAM type: YTN; PAM sequence: TTT
tctttcttttttttctcttt

SEQ ID NO: 18348 - DNA, 20 bp, Artificial Sequence
  Description of Artificial Sequence: Synthetic oligonucleotide
  Target: ANGPTL4; (+) strand; PAM type: YTN; PAM sequence: TTT
ctttcttttttttctctttc

SEQ ID NO: 18349 - DNA, 20 bp, Artificial Sequence
  Description of Artificial Sequence: Synthetic oligonucleotide
  Target: ANGPTL4; (+) strand; PAM type: YTN; PAM sequence: TTC
tttcttttttttctctttct

SEQ ID NO: 18350 - DNA, 20 bp, Artificial Sequence
  Description of Artificial Sequence: Synthetic oligonucleotide
  Target: ANGPTL4; (+) strand; PAM type: YTN; PAM sequence: CTT
tcttttttttctctttcttt

SEQ ID NO: 18351 - DNA, 20 bp, Artificial Sequence
  Description of Artificial Sequence: Synthetic oligonucleotide
  Target: ANGPTL4; (+) strand; PAM type: YTN; PAM sequence: TTT
cttttttttctctttcttta

SEQ ID NO: 18352 - DNA, 20 bp, Artificial Sequence
  Description of Artificial Sequence: Synthetic oligonucleotide
  Target: ANGPTL4; (+) strand; PAM type: YTN; PAM sequence: TTC
ttttttttctctttctttag

SEQ ID NO: 18353 - DNA, 20 bp, Artificial Sequence
  Description of Artificial Sequence: Synthetic oligonucleotide
  Target: ANGPTL4; (+) strand; PAM type: YTN; PAM sequence: CTT
ttttttctctttctttagtt

SEQ ID NO: 18354 - DNA, 20 bp, Artificial Sequence
  Description of Artificial Sequence: Synthetic oligonucleotide
  Target: ANGPTL4; (+) strand; PAM type: YTN; PAM sequence: TTT
tttttctctttctttagttc

SEQ ID NO: 18355 - DNA, 20 bp, Artificial Sequence
  Description of Artificial Sequence: Synthetic oligonucleotide
  Target: ANGPTL4; (+) strand; PAM type: YTN; PAM sequence: TTT
ttttctctttctttagttca

SEQ ID NO: 18356 - DNA, 20 bp, Artificial Sequence
  Description of Artificial Sequence: Synthetic oligonucleotide
  Target: ANGPTL4; (+) strand; PAM type: YTN; PAM sequence: TTT
tttctctttctttagttcac

SEQ ID NO: 18357 - DNA, 20 bp, Artificial Sequence
  Description of Artificial Sequence: Synthetic oligonucleotide
  Target: ANGPTL4; (+) strand; PAM type: YTN; PAM sequence: TTT
ttctctttctttagttcaca

SEQ ID NO: 18358 - DNA, 20 bp, Artificial Sequence
  Description of Artificial Sequence: Synthetic oligonucleotide
  Target: ANGPTL4; (+) strand; PAM type: YTN; PAM sequence: TTT
tctctttctttagttcacag

SEQ ID NO: 18359 - DNA, 20 bp, Artificial Sequence
  Description of Artificial Sequence: Synthetic oligonucleotide
  Target: ANGPTL4; (+) strand; PAM type: YTN; PAM sequence: TTT
ctctttctttagttcacaga

SEQ ID NO: 18360 - DNA, 20 bp, Artificial Sequence
  Description of Artificial Sequence: Synthetic oligonucleotide
  Target: ANGPTL4; (+) strand; PAM type: YTN; PAM sequence: TTC
tctttctttagttcacagat

SEQ ID NO: 18361 - DNA, 20 bp, Artificial Sequence
  Description of Artificial Sequence: Synthetic oligonucleotide
  Target: ANGPTL4; (+) strand; PAM type: YTN; PAM sequence: CTC
tttctttagttcacagatct

SEQ ID NO: 18362 - DNA, 20 bp, Artificial Sequence
  Description of Artificial Sequence: Synthetic oligonucleotide
  Target: ANGPTL4; (+) strand; PAM type: YTN; PAM sequence: CTT
tctttagttcacagatctag

SEQ ID NO: 18363 - DNA, 20 bp, Artificial Sequence
  Description of Artificial Sequence: Synthetic oligonucleotide
  Target: ANGPTL4; (+) strand; PAM type: YTN; PAM sequence: TTT
ctttagttcacagatctagt

SEQ ID NO: 18364 - DNA, 20 bp, Artificial Sequence
  Description of Artificial Sequence: Synthetic oligonucleotide
  Target: ANGPTL4; (+) strand; PAM type: YTN; PAM sequence: TTC
tttagttcacagatctagta

SEQ ID NO: 18365 - DNA, 20 bp, Artificial Sequence
  Description of Artificial Sequence: Synthetic oligonucleotide
  Target: ANGPTL4; (+) strand; PAM type: YTN; PAM sequence: CTT
tagttcacagatctagtaag

SEQ ID NO: 18366 - DNA, 20 bp, Artificial Sequence
  Description of Artificial Sequence: Synthetic oligonucleotide
  Target: ANGPTL4; (+) strand; PAM type: YTN; PAM sequence: TTT
agttcacagatctagtaagt

SEQ ID NO: 18367 - DNA, 20 bp, Artificial Sequence
  Description of Artificial Sequence: Synthetic oligonucleotide
  Target: ANGPTL4; (+) strand; PAM type: YTN; PAM sequence: TTA
gttcacagatctagtaagtt

SEQ ID NO: 18368 - DNA, 20 bp, Artificial Sequence
  Description of Artificial Sequence: Synthetic oligonucleotide
  Target: ANGPTL4; (+) strand; PAM type: YTN; PAM sequence: TTC
acagatctagtaagttaccc

SEQ ID NO: 18369 - DNA, 20 bp, Artificial Sequence
  Description of Artificial Sequence: Synthetic oligonucleotide
  Target: ANGPTL4; (+) strand; PAM type: YTN; PAM sequence: CTA
gtaagttaccctcagtttgt

SEQ ID NO: 18370 - DNA, 20 bp, Artificial Sequence
  Description of Artificial Sequence: Synthetic oligonucleotide
  Target: ANGPTL4; (+) strand; PAM type: YTN; PAM sequence: TTA
ccctcagtttgttttaaaaa

SEQ ID NO: 18371 - DNA, 20 bp, Artificial Sequence
  Description of Artificial Sequence: Synthetic oligonucleotide
  Target: ANGPTL4; (+) strand; PAM type: YTN; PAM sequence: CTC
agtttgttttaaaaagtgaa

SEQ ID NO: 18372 - DNA, 20 bp, Artificial Sequence
  Description of Artificial Sequence: Synthetic oligonucleotide
  Target: ANGPTL4; (+) strand; PAM type: YTN; PAM sequence: TTT
gttttaaaaagtgaacaaag

SEQ ID NO: 18373 - DNA, 20 bp, Artificial Sequence
  Description of Artificial Sequence: Synthetic oligonucleotide
  Target: ANGPTL4; (+) strand; PAM type: YTN; PAM sequence: TTG
ttttaaaaagtgaacaaagt

SEQ ID NO: 18374 - DNA, 20 bp, Artificial Sequence
  Description of Artificial Sequence: Synthetic oligonucleotide
  Target: ANGPTL4; (+) strand; PAM type: YTN; PAM sequence: TTT
taaaaagtgaacaaagtcca

SEQ ID NO: 18375 - DNA, 20 bp, Artificial Sequence
  Description of Artificial Sequence: Synthetic oligonucleotide
  Target: ANGPTL4; (+) strand; PAM type: YTN; PAM sequence: TTT
aaaaagtgaacaaagtccat

SEQ ID NO: 18376 - DNA, 20 bp, Artificial Sequence
  Description of Artificial Sequence: Synthetic oligonucleotide
  Target: ANGPTL4; (+) strand; PAM type: YTN; PAM sequence: TTA
aaaagtgaacaaagtccatg

SEQ ID NO: 18377 - DNA, 20 bp, Artificial Sequence
  Description of Artificial Sequence: Synthetic oligonucleotide
  Target: ANGPTL4; (+) strand; PAM type: YTN; PAM sequence: TTC
ccagggccaggcacggtgtc

SEQ ID NO: 18378 - DNA, 20 bp, Artificial Sequence
  Description of Artificial Sequence: Synthetic oligonucleotide
  Target: ANGPTL4; (+) strand; PAM type: YTN; PAM sequence: CTC
gtgcctgtaatcccagccat

SEQ ID NO: 18379 - DNA, 20 bp, Artificial Sequence
  Description of Artificial Sequence: Synthetic oligonucleotide
  Target: ANGPTL4; (+) strand; PAM type: YTN; PAM sequence: CTG
taatcccagccatttgtgag

SEQ ID NO: 18380 - DNA, 20 bp, Artificial Sequence
  Description of Artificial Sequence: Synthetic oligonucleotide
  Target: ANGPTL4; (+) strand; PAM type: YTN; PAM sequence: TTT
gtgaggccgagacaggcagg

SEQ ID NO: 18381 - DNA, 20 bp, Artificial Sequence
  Description of Artificial Sequence: Synthetic oligonucleotide
  Target: ANGPTL4; (+) strand; PAM type: YTN; PAM sequence: TTG
tgaggccgagacaggcaggt

SEQ ID NO: 18382 - DNA, 20 bp, Artificial Sequence
  Description of Artificial Sequence: Synthetic oligonucleotide
  Target: ANGPTL4; (+) strand; PAM type: YTN; PAM sequence: CTT
gaggtcagcagttcgagacc

SEQ ID NO: 18383 - DNA, 20 bp, Artificial Sequence
  Description of Artificial Sequence: Synthetic oligonucleotide
  Target: ANGPTL4; (+) strand; PAM type: YTN; PAM sequence: TTG
aggtcagcagttcgagacca

SEQ ID NO: 18384 - DNA, 20 bp, Artificial Sequence
  Description of Artificial Sequence: Synthetic oligonucleotide
  Target: ANGPTL4; (+) strand; PAM type: YTN; PAM sequence: TTC
gagaccagccgggccaacat

SEQ ID NO: 18385 - DNA, 20 bp, Artificial Sequence
  Description of Artificial Sequence: Synthetic oligonucleotide
  Target: ANGPTL4; (+) strand; PAM type: YTN; PAM sequence: CTC
tacaaaaaaatacaaaaatt

SEQ ID NO: 18386 - DNA, 20 bp, Artificial Sequence
  Description of Artificial Sequence: Synthetic oligonucleotide
  Target: ANGPTL4; (+) strand; PAM type: YTN; PAM sequence: CTA
caaaaaaatacaaaaattag

SEQ ID NO: 18387 - DNA, 20 bp, Artificial Sequence
  Description of Artificial Sequence: Synthetic oligonucleotide
  Target: ANGPTL4; (+) strand; PAM type: YTN; PAM sequence: TTA
gccgagcatggtggtgcacg

SEQ ID NO: 18388 - DNA, 20 bp, Artificial Sequence
  Description of Artificial Sequence: Synthetic oligonucleotide
  Target: ANGPTL4; (+) strand; PAM type: YTN; PAM sequence: CTG
tagtcccagctactctagag

SEQ ID NO: 18389 - DNA, 20 bp, Artificial Sequence
  Description of Artificial Sequence: Synthetic oligonucleotide
  Target: ANGPTL4; (+) strand; PAM type: YTN; PAM sequence: CTA
ctctagaggctgacgcagaa

SEQ ID NO: 18390 - DNA, 20 bp, Artificial Sequence
  Description of Artificial Sequence: Synthetic oligonucleotide
  Target: ANGPTL4; (+) strand; PAM type: YTN; PAM sequence: CTC
tagaggctgacgcagaagaa

SEQ ID NO: 18391 - DNA, 20 bp, Artificial Sequence
  Description of Artificial Sequence: Synthetic oligonucleotide
  Target: ANGPTL4; (+) strand; PAM type: YTN; PAM sequence: CTA
gaggctgacgcagaagaatc

SEQ ID NO: 18392 - DNA, 20 bp, Artificial Sequence
  Description of Artificial Sequence: Synthetic oligonucleotide
  Target: ANGPTL4; (+) strand; PAM type: YTN; PAM sequence: CTG
acgcagaagaatcacttgag

SEQ ID NO: 18393 - DNA, 20 bp, Artificial Sequence
  Description of Artificial Sequence: Synthetic oligonucleotide
  Target: ANGPTL4; (+) strand; PAM type: YTN; PAM sequence: CTT
gagccaaggaggcagaggct

SEQ ID NO: 18394 - DNA, 20 bp, Artificial Sequence
  Description of Artificial Sequence: Synthetic oligonucleotide
  Target: ANGPTL4; (+) strand; PAM type: YTN; PAM sequence: TTG
agccaaggaggcagaggctg

SEQ ID NO: 18395 - DNA, 20 bp, Artificial Sequence
  Description of Artificial Sequence: Synthetic oligonucleotide
  Target: ANGPTL4; (+) strand; PAM type: YTN; PAM sequence: CTG
caaataagccgagattgcgc

SEQ ID NO: 18396 - DNA, 20 bp, Artificial Sequence
  Description of Artificial Sequence: Synthetic oligonucleotide
  Target: ANGPTL4; (+) strand; PAM type: YTN; PAM sequence: TTG
cgccactgcactccagcctg

SEQ ID NO: 18397 - DNA, 20 bp, Artificial Sequence
  Description of Artificial Sequence: Synthetic oligonucleotide
  Target: ANGPTL4; (+) strand; PAM type: YTN; PAM sequence: CTG
cactccagcctgggcaacag

SEQ ID NO: 18398 - DNA, 20 bp, Artificial Sequence
  Description of Artificial Sequence: Synthetic oligonucleotide
  Target: ANGPTL4; (+) strand; PAM type: YTN; PAM sequence: CTC
cagcctgggcaacagagcaa

SEQ ID NO: 18399 - DNA, 20 bp, Artificial Sequence
  Description of Artificial Sequence: Synthetic oligonucleotide
  Target: ANGPTL4; (+) strand; PAM type: YTN; PAM sequence: CTG
ggcaacagagcaagactcca

SEQ ID NO: 18400 - DNA, 20 bp, Artificial Sequence
  Description of Artificial Sequence: Synthetic oligonucleotide
  Target: ANGPTL4; (+) strand; PAM type: YTN; PAM sequence: CTC
catctcaaaacaaaaataat

SEQ ID NO: 18401 - DNA, 20 bp, Artificial Sequence
  Description of Artificial Sequence: Synthetic oligonucleotide
  Target: ANGPTL4; (+) strand; PAM type: YTN; PAM sequence: CTC
aaaacaaaaataattttttt

SEQ ID NO: 18402 - DNA, 20 bp, Artificial Sequence
  Description of Artificial Sequence: Synthetic oligonucleotide
  Target: ANGPTL4; (+) strand; PAM type: YTN; PAM sequence: TTT
ttttttcgtagaggcagggt

SEQ ID NO: 18403 - DNA, 20 bp, Artificial Sequence
  Description of Artificial Sequence: Synthetic oligonucleotide
  Target: ANGPTL4; (+) strand; PAM type: YTN; PAM sequence: TTT
tttttcgtagaggcagggtc

SEQ ID NO: 18404 - DNA, 20 bp, Artificial Sequence
  Description of Artificial Sequence: Synthetic oligonucleotide
  Target: ANGPTL4; (+) strand; PAM type: YTN; PAM sequence: TTT
ttttcgtagaggcagggtct

SEQ ID NO: 18405 - DNA, 20 bp, Artificial Sequence
  Description of Artificial Sequence: Synthetic oligonucleotide
  Target: ANGPTL4; (+) strand; PAM type: YTN; PAM sequence: TTT
tttcgtagaggcagggtctc

SEQ ID NO: 18406 - DNA, 20 bp, Artificial Sequence
  Description of Artificial Sequence: Synthetic oligonucleotide
  Target: ANGPTL4; (+) strand; PAM type: YTN; PAM sequence: TTT
ttcgtagaggcagggtctca

SEQ ID NO: 18407 - DNA, 20 bp, Artificial Sequence
  Description of Artificial Sequence: Synthetic oligonucleotide
  Target: ANGPTL4; (+) strand; PAM type: YTN; PAM sequence: TTT
tcgtagaggcagggtctcat

SEQ ID NO: 18408 - DNA, 20 bp, Artificial Sequence
  Description of Artificial Sequence: Synthetic oligonucleotide
  Target: ANGPTL4; (+) strand; PAM type: YTN; PAM sequence: TTT
cgtagaggcagggtctcatt

SEQ ID NO: 18409 - DNA, 20 bp, Artificial Sequence
  Description of Artificial Sequence: Synthetic oligonucleotide
  Target: ANGPTL4; (+) strand; PAM type: YTN; PAM sequence: TTC
gtagaggcagggtctcattc

SEQ ID NO: 18410 - DNA, 20 bp, Artificial Sequence
  Description of Artificial Sequence: Synthetic oligonucleotide
  Target: ANGPTL4; (+) strand; PAM type: YTN; PAM sequence: CTC
attctattgtccaggctggt

SEQ ID NO: 18411 - DNA, 20 bp, Artificial Sequence
  Description of Artificial Sequence: Synthetic oligonucleotide
  Target: ANGPTL4; (+) strand; PAM type: YTN; PAM sequence: TTC
tattgtccaggctggtctca

SEQ ID NO: 18412 - DNA, 20 bp, Artificial Sequence
  Description of Artificial Sequence: Synthetic oligonucleotide
  Target: ANGPTL4; (+) strand; PAM type: YTN; PAM sequence: CTA
ttgtccaggctggtctcaaa

SEQ ID NO: 18413 - DNA, 20 bp, Artificial Sequence
  Description of Artificial Sequence: Synthetic oligonucleotide
  Target: ANGPTL4; (+) strand; PAM type: YTN; PAM sequence: TTG
tccaggctggtctcaaacac

SEQ ID NO: 18414 - DNA, 20 bp, Artificial Sequence
  Description of Artificial Sequence: Synthetic oligonucleotide
  Target: ANGPTL4; (+) strand; PAM type: YTN; PAM sequence: CTG
gtctcaaacaccgagactca

SEQ ID NO: 18415 - DNA, 20 bp, Artificial Sequence
  Description of Artificial Sequence: Synthetic oligonucleotide
  Target: ANGPTL4; (+) strand; PAM type: YTN; PAM sequence: CTC
aaacaccgagactcaaggga

SEQ ID NO: 18416 - DNA, 20 bp, Artificial Sequence
  Description of Artificial Sequence: Synthetic oligonucleotide
  Target: ANGPTL4; (+) strand; PAM type: YTN; PAM sequence: CTC
aagggatcctcctgccttgg

SEQ ID NO: 18417 - DNA, 20 bp, Artificial Sequence
  Description of Artificial Sequence: Synthetic oligonucleotide
  Target: ANGPTL4; (+) strand; PAM type: YTN; PAM sequence: CTC
ctgccttggcttcacaaagt

SEQ ID NO: 18418 - DNA, 20 bp, Artificial Sequence
  Description of Artificial Sequence: Synthetic oligonucleotide
  Target: ANGPTL4; (+) strand; PAM type: YTN; PAM sequence: CTG
ccttggcttcacaaagtgat

SEQ ID NO: 18419 - DNA, 20 bp, Artificial Sequence
  Description of Artificial Sequence: Synthetic oligonucleotide
  Target: ANGPTL4; (+) strand; PAM type: YTN; PAM sequence: CTT
ggcttcacaaagtgatggga

SEQ ID NO: 18420 - DNA, 20 bp, Artificial Sequence
  Description of Artificial Sequence: Synthetic oligonucleotide
  Target: ANGPTL4; (+) strand; PAM type: YTN; PAM sequence: TTG
gcttcacaaagtgatgggat

SEQ ID NO: 18421 - DNA, 20 bp, Artificial Sequence
  Description of Artificial Sequence: Synthetic oligonucleotide
  Target: ANGPTL4; (+) strand; PAM type: YTN; PAM sequence: CTT
cacaaagtgatgggattaaa

SEQ ID NO: 18422 - DNA, 20 bp, Artificial Sequence
  Description of Artificial Sequence: Synthetic oligonucleotide
  Target: ANGPTL4; (+) strand; PAM type: YTN; PAM sequence: TTC
acaaagtgatgggattaaag

SEQ ID NO: 18423 - DNA, 20 bp, Artificial Sequence
  Description of Artificial Sequence: Synthetic oligonucleotide
  Target: ANGPTL4; (+) strand; PAM type: YTN; PAM sequence: TTA
aaggtgtgagcgccactgca

SEQ ID NO: 18424 - DNA, 20 bp, Artificial Sequence
  Description of Artificial Sequence: Synthetic oligonucleotide
  Target: ANGPTL4; (+) strand; PAM type: YTN; PAM sequence: CTG
cacccacccctgaaggctct

SEQ ID NO: 18425 - DNA, 20 bp, Artificial Sequence
  Description of Artificial Sequence: Synthetic oligonucleotide
  Target: ANGPTL4; (+) strand; PAM type: YTN; PAM sequence: CTG
aaggctctaattctacatct

SEQ ID NO: 18426 - DNA, 20 bp, Artificial Sequence
  Description of Artificial Sequence: Synthetic oligonucleotide
  Target: ANGPTL4; (+) strand; PAM type: YTN; PAM sequence: CTC
taattctacatctgtgtttt

SEQ ID NO: 18427 - DNA, 20 bp, Artificial Sequence
  Description of Artificial Sequence: Synthetic oligonucleotide
  Target: ANGPTL4; (+) strand; PAM type: YTN; PAM sequence: CTA
attctacatctgtgttttgt

SEQ ID NO: 18428 - DNA, 20 bp, Artificial Sequence
  Description of Artificial Sequence: Synthetic oligonucleotide
  Target: ANGPTL4; (+) strand; PAM type: YTN; PAM sequence: TTC
tacatctgtgttttgttaaa

SEQ ID NO: 18429 - DNA, 20 bp, Artificial Sequence
  Description of Artificial Sequence: Synthetic oligonucleotide
  Target: ANGPTL4; (+) strand; PAM type: YTN; PAM sequence: CTA
catctgtgttttgttaaaaa

SEQ ID NO: 18430 - DNA, 20 bp, Artificial Sequence
  Description of Artificial Sequence: Synthetic oligonucleotide
  Target: ANGPTL4; (+) strand; PAM type: YTN; PAM sequence: CTG
tgttttgttaaaaaaaaaaa

SEQ ID NO: 18431 - DNA, 20 bp, Artificial Sequence
  Description of Artificial Sequence: Synthetic oligonucleotide
  Target: ANGPTL4; (+) strand; PAM type: YTN; PAM sequence: TTT
tgttaaaaaaaaaaaaaaaa

SEQ ID NO: 18432 - DNA, 20 bp, Artificial Sequence
  Description of Artificial Sequence: Synthetic oligonucleotide
  Target: ANGPTL4; (+) strand; PAM type: YTN; PAM sequence: TTT
gttaaaaaaaaaaaaaaaag

SEQ ID NO: 18433 - DNA, 20 bp, Artificial Sequence
  Description of Artificial Sequence: Synthetic oligonucleotide
  Target: ANGPTL4; (+) strand; PAM type: YTN; PAM sequence: TTG
ttaaaaaaaaaaaaaaaaga

SEQ ID NO: 18434 - DNA, 20 bp, Artificial Sequence
  Description of Artificial Sequence: Synthetic oligonucleotide
  Target: ANGPTL4; (+) strand; PAM type: YTN; PAM sequence: TTA
aaaaaaaaaaaaaaagatgg

SEQ ID NO: 18435 - DNA, 20 bp, Artificial Sequence
  Description of Artificial Sequence: Synthetic oligonucleotide
  Target: ANGPTL4; (+) strand; PAM type: YTN; PAM sequence: CTC
atgcctgtaatcccagcact

SEQ ID NO: 18436 - DNA, 20 bp, Artificial Sequence
  Description of Artificial Sequence: Synthetic oligonucleotide
  Target: ANGPTL4; (+) strand; PAM type: YTN; PAM sequence: CTG
taatcccagcactttaggag

SEQ ID NO: 18437 - DNA, 20 bp, Artificial Sequence
  Description of Artificial Sequence: Synthetic oligonucleotide
  Target: ANGPTL4; (+) strand; PAM type: YTN; PAM sequence: CTT
taggaggccgaggcaggtgg

SEQ ID NO: 18438 - DNA, 20 bp, Artificial Sequence
  Description of Artificial Sequence: Synthetic oligonucleotide
  Target: ANGPTL4; (+) strand; PAM type: YTN; PAM sequence: TTT
aggaggccgaggcaggtgga

SEQ ID NO: 18439 - DNA, 20 bp, Artificial Sequence
  Description of Artificial Sequence: Synthetic oligonucleotide
  Target: ANGPTL4; (+) strand; PAM type: YTN; PAM sequence: TTA
ggaggccgaggcaggtggat

SEQ ID NO: 18440 - DNA, 20 bp, Artificial Sequence
  Description of Artificial Sequence: Synthetic oligonucleotide
  Target: ANGPTL4; (+) strand; PAM type: YTN; PAM sequence: CTG
acattacgagttccaggccc

SEQ ID NO: 18441 - DNA, 20 bp, Artificial Sequence
  Description of Artificial Sequence: Synthetic oligonucleotide
  Target: ANGPTL4; (+) strand; PAM type: YTN; PAM sequence: TTA
cgagttccaggcccgcctga

SEQ ID NO: 18442 - DNA, 20 bp, Artificial Sequence
  Description of Artificial Sequence: Synthetic oligonucleotide
  Target: ANGPTL4; (+) strand; PAM type: YTN; PAM sequence: TTC
caggcccgcctgaccaacat

SEQ ID NO: 18443 - DNA, 20 bp, Artificial Sequence
  Description of Artificial Sequence: Synthetic oligonucleotide
  Target: ANGPTL4; (+) strand; PAM type: YTN; PAM sequence: CTG
accaacatggtgaaaccccg

SEQ ID NO: 18444 - DNA, 20 bp, Artificial Sequence
  Description of Artificial Sequence: Synthetic oligonucleotide
  Target: ANGPTL4; (+) strand; PAM type: YTN; PAM sequence: CTC
tactaaaaatacaaaaatta

SEQ ID NO: 18445 - DNA, 20 bp, Artificial Sequence
  Description of Artificial Sequence: Synthetic oligonucleotide
  Target: ANGPTL4; (+) strand; PAM type: YTN; PAM sequence: CTA
ctaaaaatacaaaaattagc

SEQ ID NO: 18446 - DNA, 20 bp, Artificial Sequence
  Description of Artificial Sequence: Synthetic oligonucleotide
  Target: ANGPTL4; (+) strand; PAM type: YTN; PAM sequence: CTA
aaaatacaaaaattagccgg

SEQ ID NO: 18447 - DNA, 20 bp, Artificial Sequence
  Description of Artificial Sequence: Synthetic oligonucleotide
  Target: ANGPTL4; (+) strand; PAM type: YTN; PAM sequence: TTA
gccgggtgtggtggcgggtg

SEQ ID NO: 18448 - DNA, 20 bp, Artificial Sequence
  Description of Artificial Sequence: Synthetic oligonucleotide
  Target: ANGPTL4; (+) strand; PAM type: YTN; PAM sequence: CTG
taatcccagctactcaggag

SEQ ID NO: 18449 - DNA, 20 bp, Artificial Sequence
  Description of Artificial Sequence: Synthetic oligonucleotide
  Target: ANGPTL4; (+) strand; PAM type: YTN; PAM sequence: CTA
ctcaggaggctgaggcagga

SEQ ID NO: 18450 - DNA, 20 bp, Artificial Sequence
  Description of Artificial Sequence: Synthetic oligonucleotide
  Target: ANGPTL4; (+) strand; PAM type: YTN; PAM sequence: CTC
aggaggctgaggcaggagaa

SEQ ID NO: 18451 - DNA, 20 bp, Artificial Sequence
  Description of Artificial Sequence: Synthetic oligonucleotide
  Target: ANGPTL4; (+) strand; PAM type: YTN; PAM sequence: CTG
aggcaggagaatcacttgaa

SEQ ID NO: 18452 - DNA, 20 bp, Artificial Sequence
  Description of Artificial Sequence: Synthetic oligonucleotide
  Target: ANGPTL4; (+) strand; PAM type: YTN; PAM sequence: CTT
gaactcgggaggtggaggtt

SEQ ID NO: 18453 - DNA, 20 bp, Artificial Sequence
  Description of Artificial Sequence: Synthetic oligonucleotide
  Target: ANGPTL4; (+) strand; PAM type: YTN; PAM sequence: TTG
aactcgggaggtggaggttg

SEQ ID NO: 18454 - DNA, 20 bp, Artificial Sequence
  Description of Artificial Sequence: Synthetic oligonucleotide
  Target: ANGPTL4; (+) strand; PAM type: YTN; PAM sequence: CTC
gggaggtggaggttgcggtg

SEQ ID NO: 18455 - DNA, 20 bp, Artificial Sequence
  Description of Artificial Sequence: Synthetic oligonucleotide
  Target: ANGPTL4; (+) strand; PAM type: YTN; PAM sequence: TTG
cggtgagcagagatcatgcc

SEQ ID NO: 18456 - DNA, 20 bp, Artificial Sequence
  Description of Artificial Sequence: Synthetic oligonucleotide
  Target: ANGPTL4; (+) strand; PAM type: YTN; PAM sequence: CTG
cactccagcctgggtgacag

SEQ ID NO: 18457 - DNA, 20 bp, Artificial Sequence
  Description of Artificial Sequence: Synthetic oligonucleotide
  Target: ANGPTL4; (+) strand; PAM type: YTN; PAM sequence: CTC
cagcctgggtgacagagcaa

SEQ ID NO: 18458 - DNA, 20 bp, Artificial Sequence
  Description of Artificial Sequence: Synthetic oligonucleotide
  Target: ANGPTL4; (+) strand; PAM type: YTN; PAM sequence: CTG
ggtgacagagcaagacttga

SEQ ID NO: 18459 - DNA, 20 bp, Artificial Sequence
  Description of Artificial Sequence: Synthetic oligonucleotide
  Target: ANGPTL4; (+) strand; PAM type: YTN; PAM sequence: CTT
gatttcaaaaaaaaaaaaaa

SEQ ID NO: 18460 - DNA, 20 bp, Artificial Sequence
  Description of Artificial Sequence: Synthetic oligonucleotide
  Target: ANGPTL4; (+) strand; PAM type: YTN; PAM sequence: TTG
atttcaaaaaaaaaaaaaaa

SEQ ID NO: 18461 - DNA, 20 bp, Artificial Sequence
  Description of Artificial Sequence: Synthetic oligonucleotide
  Target: ANGPTL4; (+) strand; PAM type: YTN; PAM sequence: TTT
caaaaaaaaaaaaaaaaaaa

SEQ ID NO: 18462 - DNA, 20 bp, Artificial Sequence
  Description of Artificial Sequence: Synthetic oligonucleotide
  Target: ANGPTL4; (+) strand; PAM type: YTN; PAM sequence: TTC
aaaaaaaaaaaaaaaaaaaa

SEQ ID NO: 18463 - DNA, 20 bp, Artificial Sequence
  Description of Artificial Sequence: Synthetic oligonucleotide
  Target: ANGPTL4; (+) strand; PAM type: YTN; PAM sequence: CTG
ggcgcattggctcacacttg

SEQ ID NO: 18464 - DNA, 20 bp, Artificial Sequence
  Description of Artificial Sequence: Synthetic oligonucleotide
  Target: ANGPTL4; (+) strand; PAM type: YTN; PAM sequence: TTG
gctcacacttgtaacactag

SEQ ID NO: 18465 - DNA, 20 bp, Artificial Sequence
  Description of Artificial Sequence: Synthetic oligonucleotide
  Target: ANGPTL4; (+) strand; PAM type: YTN; PAM sequence: CTC
acacttgtaacactagcact

SEQ ID NO: 18466 - DNA, 20 bp, Artificial Sequence
  Description of Artificial Sequence: Synthetic oligonucleotide
  Target: ANGPTL4; (+) strand; PAM type: YTN; PAM sequence: CTT
gtaacactagcactttggga

SEQ ID NO: 18467 - DNA, 20 bp, Artificial Sequence
  Description of Artificial Sequence: Synthetic oligonucleotide
  Target: ANGPTL4; (+) strand; PAM type: YTN; PAM sequence: TTG
taacactagcactttgggag

SEQ ID NO: 18468 - DNA, 20 bp, Artificial Sequence
  Description of Artificial Sequence: Synthetic oligonucleotide
  Target: ANGPTL4; (+) strand; PAM type: YTN; PAM sequence: CTA
gcactttgggaggccaacga

SEQ ID NO: 18469 - DNA, 20 bp, Artificial Sequence
  Description of Artificial Sequence: Synthetic oligonucleotide
  Target: ANGPTL4; (+) strand; PAM type: YTN; PAM sequence: CTT
tgggaggccaacgagcggat

SEQ ID NO: 18470 - DNA, 20 bp, Artificial Sequence
  Description of Artificial Sequence: Synthetic oligonucleotide
  Target: ANGPTL4; (+) strand; PAM type: YTN; PAM sequence: TTT
gggaggccaacgagcggatc

SEQ ID NO: 18471 - DNA, 20 bp, Artificial Sequence
  Description of Artificial Sequence: Synthetic oligonucleotide
  Target: ANGPTL4; (+) strand; PAM type: YTN; PAM sequence: TTG
ggaggccaacgagcggatca

SEQ ID NO: 18472 - DNA, 20 bp, Artificial Sequence
  Description of Artificial Sequence: Synthetic oligonucleotide
  Target: ANGPTL4; (+) strand; PAM type: YTN; PAM sequence: CTG
tattgctctatatagtgaga

SEQ ID NO: 18473 - DNA, 20 bp, Artificial Sequence
  Description of Artificial Sequence: Synthetic oligonucleotide
  Target: ANGPTL4; (+) strand; PAM type: YTN; PAM sequence: TTG
ctctatatagtgagatccct

SEQ ID NO: 18474 - DNA, 20 bp, Artificial Sequence
  Description of Artificial Sequence: Synthetic oligonucleotide
  Target: ANGPTL4; (+) strand; PAM type: YTN; PAM sequence: CTC
tatatagtgagatccctata

SEQ ID NO: 18475 - DNA, 20 bp, Artificial Sequence
  Description of Artificial Sequence: Synthetic oligonucleotide
  Target: ANGPTL4; (+) strand; PAM type: YTN; PAM sequence: CTA
tatagtgagatccctatata

SEQ ID NO: 18476 - DNA, 20 bp, Artificial Sequence
  Description of Artificial Sequence: Synthetic oligonucleotide
  Target: ANGPTL4; (+) strand; PAM type: YTN; PAM sequence: CTA
tatagggtctcactctattg

SEQ ID NO: 18477 - DNA, 20 bp, Artificial Sequence
  Description of Artificial Sequence: Synthetic oligonucleotide
  Target: ANGPTL4; (+) strand; PAM type: YTN; PAM sequence: CTC
actctattgtccaggctggt

SEQ ID NO: 18478 - DNA, 20 bp, Artificial Sequence
  Description of Artificial Sequence: Synthetic oligonucleotide
  Target: ANGPTL4; (+) strand; PAM type: YTN; PAM sequence: CTC
tattgtccaggctggtctgg

SEQ ID NO: 18479 - DNA, 20 bp, Artificial Sequence
  Description of Artificial Sequence: Synthetic oligonucleotide
  Target: ANGPTL4; (+) strand; PAM type: YTN; PAM sequence: CTA
ttgtccaggctggtctggcc

SEQ ID NO: 18480 - DNA, 20 bp, Artificial Sequence
  Description of Artificial Sequence: Synthetic oligonucleotide
  Target: ANGPTL4; (+) strand; PAM type: YTN; PAM sequence: TTG
tccaggctggtctggcctgg

SEQ ID NO: 18481 - DNA, 20 bp, Artificial Sequence
  Description of Artificial Sequence: Synthetic oligonucleotide
  Target: ANGPTL4; (+) strand; PAM type: YTN; PAM sequence: CTG
gtctggcctggccaatgtgg

SEQ ID NO: 18482 - DNA, 20 bp, Artificial Sequence
  Description of Artificial Sequence: Synthetic oligonucleotide
  Target: ANGPTL4; (+) strand; PAM type: YTN; PAM sequence: CTG
gcctggccaatgtggtgaaa

SEQ ID NO: 18483 - DNA, 20 bp, Artificial Sequence
  Description of Artificial Sequence: Synthetic oligonucleotide
  Target: ANGPTL4; (+) strand; PAM type: YTN; PAM sequence: CTG
gccaatgtggtgaaacctca

SEQ ID NO: 18484 - DNA, 20 bp, Artificial Sequence
  Description of Artificial Sequence: Synthetic oligonucleotide
  Target: ANGPTL4; (+) strand; PAM type: YTN; PAM sequence: CTC
atttctactaaaaatacaaa

SEQ ID NO: 18485 - DNA, 20 bp, Artificial Sequence
  Description of Artificial Sequence: Synthetic oligonucleotide
  Target: ANGPTL4; (+) strand; PAM type: YTN; PAM sequence: TTT
ctactaaaaatacaaaaatt

SEQ ID NO: 18486 - DNA, 20 bp, Artificial Sequence
  Description of Artificial Sequence: Synthetic oligonucleotide
  Target: ANGPTL4; (+) strand; PAM type: YTN; PAM sequence: TTC
tactaaaaatacaaaaatta

SEQ ID NO: 18487 - DNA, 20 bp, Artificial Sequence
  Description of Artificial Sequence: Synthetic oligonucleotide
  Target: ANGPTL4; (+) strand; PAM type: YTN; PAM sequence: CTA
ctaaaaatacaaaaattagc

SEQ ID NO: 18488 - DNA, 20 bp, Artificial Sequence
  Description of Artificial Sequence: Synthetic oligonucleotide
  Target: ANGPTL4; (+) strand; PAM type: YTN; PAM sequence: CTA
aaaatacaaaaattagctgg

SEQ ID NO: 18489 - DNA, 20 bp, Artificial Sequence
  Description of Artificial Sequence: Synthetic oligonucleotide
  Target: ANGPTL4; (+) strand; PAM type: YTN; PAM sequence: TTA
gctgggcatagtgatgcgca

SEQ ID NO: 18490 - DNA, 20 bp, Artificial Sequence
  Description of Artificial Sequence: Synthetic oligonucleotide
  Target: ANGPTL4; (+) strand; PAM type: YTN; PAM sequence: CTG
ggcatagtgatgcgcaccta

SEQ ID NO: 18491 - DNA, 20 bp, Artificial Sequence
  Description of Artificial Sequence: Synthetic oligonucleotide
  Target: ANGPTL4; (+) strand; PAM type: YTN; PAM sequence: CTA
taatcccagctactcaggag

SEQ ID NO: 18492 - DNA, 20 bp, Artificial Sequence
  Description of Artificial Sequence: Synthetic oligonucleotide
  Target: ANGPTL4; (+) strand; PAM type: YTN; PAM sequence: CTA
ctcaggaggctgaggccgga

SEQ ID NO: 18493 - DNA, 20 bp, Artificial Sequence
  Description of Artificial Sequence: Synthetic oligonucleotide
  Target: ANGPTL4; (+) strand; PAM type: YTN; PAM sequence: CTC
aggaggctgaggccggagaa

SEQ ID NO: 18494 - DNA, 20 bp, Artificial Sequence
  Description of Artificial Sequence: Synthetic oligonucleotide
  Target: ANGPTL4; (+) strand; PAM type: YTN; PAM sequence: CTG
aggccggagaattgcttgaa

SEQ ID NO: 18495 - DNA, 20 bp, Artificial Sequence
  Description of Artificial Sequence: Synthetic oligonucleotide
  Target: ANGPTL4; (+) strand; PAM type: YTN; PAM sequence: TTG
cttgaacccaggaggtggag

SEQ ID NO: 18496 - DNA, 20 bp, Artificial Sequence
  Description of Artificial Sequence: Synthetic oligonucleotide
  Target: ANGPTL4; (+) strand; PAM type: YTN; PAM sequence: CTT
gaacccaggaggtggaggtt

SEQ ID NO: 18497 - DNA, 20 bp, Artificial Sequence
  Description of Artificial Sequence: Synthetic oligonucleotide
  Target: ANGPTL4; (+) strand; PAM type: YTN; PAM sequence: TTG
aacccaggaggtggaggttg

SEQ ID NO: 18498 - DNA, 20 bp, Artificial Sequence
  Description of Artificial Sequence: Synthetic oligonucleotide
  Target: ANGPTL4; (+) strand; PAM type: YTN; PAM sequence: TTG
cagtgagccgagatggcgct

SEQ ID NO: 18499 - DNA, 20 bp, Artificial Sequence
  Description of Artificial Sequence: Synthetic oligonucleotide
  Target: ANGPTL4; (+) strand; PAM type: YTN; PAM sequence: CTG
agaggtgacagcgtgctggc

SEQ ID NO: 18500 - DNA, 20 bp, Artificial Sequence
  Description of Artificial Sequence: Synthetic oligonucleotide
  Target: ANGPTL4; (+) strand; PAM type: YTN; PAM sequence: CTG
gcagtcctcacagccctcgc

SEQ ID NO: 18501 - DNA, 20 bp, Artificial Sequence
  Description of Artificial Sequence: Synthetic oligonucleotide
  Target: ANGPTL4; (+) strand; PAM type: YTN; PAM sequence: CTC
acagccctcgctcactctct

SEQ ID NO: 18502 - DNA, 20 bp, Artificial Sequence
  Description of Artificial Sequence: Synthetic oligonucleotide
  Target: ANGPTL4; (+) strand; PAM type: YTN; PAM sequence: CTC
gctcactctctgcgactcct

SEQ ID NO: 18503 - DNA, 20 bp, Artificial Sequence
  Description of Artificial Sequence: Synthetic oligonucleotide
  Target: ANGPTL4; (+) strand; PAM type: YTN; PAM sequence: CTC
actctctgcgactcctctgc

SEQ ID NO: 18504 - DNA, 20 bp, Artificial Sequence
  Description of Artificial Sequence: Synthetic oligonucleotide
  Target: ANGPTL4; (+) strand; PAM type: YTN; PAM sequence: CTC
tctgcgactcctctgcctgg

SEQ ID NO: 18505 - DNA, 20 bp, Artificial Sequence
  Description of Artificial Sequence: Synthetic oligonucleotide
  Target: ANGPTL4; (+) strand; PAM type: YTN; PAM sequence: CTC
tgcgactcctctgcctgggc

SEQ ID NO: 18506 - DNA, 20 bp, Artificial Sequence
  Description of Artificial Sequence: Synthetic oligonucleotide
  Target: ANGPTL4; (+) strand; PAM type: YTN; PAM sequence: CTG
cgactcctctgcctgggctc

SEQ ID NO: 18507 - DNA, 20 bp, Artificial Sequence
  Description of Artificial Sequence: Synthetic oligonucleotide
  Target: ANGPTL4; (+) strand; PAM type: YTN; PAM sequence: CTC
ctctgcctgggctcccactg

SEQ ID NO: 18508 - DNA, 20 bp, Artificial Sequence
  Description of Artificial Sequence: Synthetic oligonucleotide
  Target: ANGPTL4; (+) strand; PAM type: YTN; PAM sequence: CTC
tgcctgggctcccactgtgg

SEQ ID NO: 18509 - DNA, 20 bp, Artificial Sequence
  Description of Artificial Sequence: Synthetic oligonucleotide
  Target: ANGPTL4; (+) strand; PAM type: YTN; PAM sequence: CTG
cctgggctcccactgtggcg

SEQ ID NO: 18510 - DNA, 20 bp, Artificial Sequence
  Description of Artificial Sequence: Synthetic oligonucleotide
  Target: ANGPTL4; (+) strand; PAM type: YTN; PAM sequence: CTG
ggctcccactgtggcggcac

SEQ ID NO: 18511 - DNA, 20 bp, Artificial Sequence
  Description of Artificial Sequence: Synthetic oligonucleotide
  Target: ANGPTL4; (+) strand; PAM type: YTN; PAM sequence: CTC
ccactgtggcggcacttcag

SEQ ID NO: 18512 - DNA, 20 bp, Artificial Sequence
  Description of Artificial Sequence: Synthetic oligonucleotide
  Target: ANGPTL4; (+) strand; PAM type: YTN; PAM sequence: CTG
tggcggcacttcaggagccc

SEQ ID NO: 18513 - DNA, 20 bp, Artificial Sequence
  Description of Artificial Sequence: Synthetic oligonucleotide
  Target: ANGPTL4; (+) strand; PAM type: YTN; PAM sequence: CTT
caggagcccttcagcccacc

SEQ ID NO: 18514 - DNA, 20 bp, Artificial Sequence
  Description of Artificial Sequence: Synthetic oligonucleotide
  Target: ANGPTL4; (+) strand; PAM type: YTN; PAM sequence: TTC
aggagcccttcagcccaccg

SEQ ID NO: 18515 - DNA, 20 bp, Artificial Sequence
  Description of Artificial Sequence: Synthetic oligonucleotide
  Target: ANGPTL4; (+) strand; PAM type: YTN; PAM sequence: CTT
cagcccaccgctgcactgtg

SEQ ID NO: 18516 - DNA, 20 bp, Artificial Sequence
  Description of Artificial Sequence: Synthetic oligonucleotide
  Target: ANGPTL4; (+) strand; PAM type: YTN; PAM sequence: TTC
agcccaccgctgcactgtgg

SEQ ID NO: 18517 - DNA, 20 bp, Artificial Sequence
  Description of Artificial Sequence: Synthetic oligonucleotide
  Target: ANGPTL4; (+) strand; PAM type: YTN; PAM sequence: CTG
cactgtgggagcccctttct

SEQ ID NO: 18518 - DNA, 20 bp, Artificial Sequence
  Description of Artificial Sequence: Synthetic oligonucleotide
  Target: ANGPTL4; (+) strand; PAM type: YTN; PAM sequence: CTG
tgggagcccctttctgggct

SEQ ID NO: 18519 - DNA, 20 bp, Artificial Sequence
  Description of Artificial Sequence: Synthetic oligonucleotide
  Target: ANGPTL4; (+) strand; PAM type: YTN; PAM sequence: CTT
tctgggctggccaaggccgg

SEQ ID NO: 18520 - DNA, 20 bp, Artificial Sequence
  Description of Artificial Sequence: Synthetic oligonucleotide
  Target: ANGPTL4; (+) strand; PAM type: YTN; PAM sequence: TTT
ctgggctggccaaggccgga

SEQ ID NO: 18521 - DNA, 20 bp, Artificial Sequence
  Description of Artificial Sequence: Synthetic oligonucleotide
  Target: ANGPTL4; (+) strand; PAM type: YTN; PAM sequence: TTC
tgggctggccaaggccggag

SEQ ID NO: 18522 - DNA, 20 bp, Artificial Sequence
  Description of Artificial Sequence: Synthetic oligonucleotide
  Target: ANGPTL4; (+) strand; PAM type: YTN; PAM sequence: CTG
ggctggccaaggccggagct

SEQ ID NO: 18523 - DNA, 20 bp, Artificial Sequence
  Description of Artificial Sequence: Synthetic oligonucleotide
  Target: ANGPTL4; (+) strand; PAM type: YTN; PAM sequence: CTG
gccaaggccggagctggctc

SEQ ID NO: 18524 - DNA, 20 bp, Artificial Sequence
  Description of Artificial Sequence: Synthetic oligonucleotide
  Target: ANGPTL4; (+) strand; PAM type: YTN; PAM sequence: CTG
gctccctcagcttgcaggga

SEQ ID NO: 18525 - DNA, 20 bp, Artificial Sequence
  Description of Artificial Sequence: Synthetic oligonucleotide
  Target: ANGPTL4; (+) strand; PAM type: YTN; PAM sequence: CTC
cctcagcttgcagggaagtg

SEQ ID NO: 18526 - DNA, 20 bp, Artificial Sequence
  Description of Artificial Sequence: Synthetic oligonucleotide
  Target: ANGPTL4; (+) strand; PAM type: YTN; PAM sequence: CTC
agcttgcagggaagtgtgga

SEQ ID NO: 18527 - DNA, 20 bp, Artificial Sequence
  Description of Artificial Sequence: Synthetic oligonucleotide
  Target: ANGPTL4; (+) strand; PAM type: YTN; PAM sequence: CTT
gcagggaagtgtggagggag

SEQ ID NO: 18528 - DNA, 20 bp, Artificial Sequence
  Description of Artificial Sequence: Synthetic oligonucleotide
  Target: ANGPTL4; (+) strand; PAM type: YTN; PAM sequence: TTG
cagggaagtgtggagggaga

SEQ ID NO: 18529 - DNA, 20 bp, Artificial Sequence
  Description of Artificial Sequence: Synthetic oligonucleotide
  Target: ANGPTL4; (+) strand; PAM type: YTN; PAM sequence: CTG
cgcgcggtgcttgtgggcca

SEQ ID NO: 18530 - DNA, 20 bp, Artificial Sequence
  Description of Artificial Sequence: Synthetic oligonucleotide
  Target: ANGPTL4; (+) strand; PAM type: YTN; PAM sequence: CTT
gtgggccagctggagttccg

SEQ ID NO: 18531 - DNA, 20 bp, Artificial Sequence
  Description of Artificial Sequence: Synthetic oligonucleotide
  Target: ANGPTL4; (+) strand; PAM type: YTN; PAM sequence: TTG
tgggccagctggagttccgg

SEQ ID NO: 18532 - DNA, 20 bp, Artificial Sequence
  Description of Artificial Sequence: Synthetic oligonucleotide
  Target: ANGPTL4; (+) strand; PAM type: YTN; PAM sequence: CTG
gagttccgggtgggcgtggg

SEQ ID NO: 18533 - DNA, 20 bp, Artificial Sequence
  Description of Artificial Sequence: Synthetic oligonucleotide
  Target: ANGPTL4; (+) strand; PAM type: YTN; PAM sequence: TTC
cgggtgggcgtgggcttggc

SEQ ID NO: 18534 - DNA, 20 bp, Artificial Sequence
  Description of Artificial Sequence: Synthetic oligonucleotide
  Target: ANGPTL4; (+) strand; PAM type: YTN; PAM sequence: CTT
ggcggaccctgcactcagag

SEQ ID NO: 18535 - DNA, 20 bp, Artificial Sequence
  Description of Artificial Sequence: Synthetic oligonucleotide
  Target: ANGPTL4; (+) strand; PAM type: YTN; PAM sequence: TTG
gcggaccctgcactcagagc

SEQ ID NO: 18536 - DNA, 20 bp, Artificial Sequence
  Description of Artificial Sequence: Synthetic oligonucleotide
  Target: ANGPTL4; (+) strand; PAM type: YTN; PAM sequence: CTG
cactcagagcagccgtccgg

SEQ ID NO: 18537 - DNA, 20 bp, Artificial Sequence
  Description of Artificial Sequence: Synthetic oligonucleotide
  Target: ANGPTL4; (+) strand; PAM type: YTN; PAM sequence: CTC
agagcagccgtccggccctg

SEQ ID NO: 18538 - DNA, 20 bp, Artificial Sequence
  Description of Artificial Sequence: Synthetic oligonucleotide
  Target: ANGPTL4; (+) strand; PAM type: YTN; PAM sequence: CTG
ctggccccgggcaatgaggg

SEQ ID NO: 18539 - DNA, 20 bp, Artificial Sequence
  Description of Artificial Sequence: Synthetic oligonucleotide
  Target: ANGPTL4; (+) strand; PAM type: YTN; PAM sequence: CTG
gccccgggcaatgaggggct

SEQ ID NO: 18540 - DNA, 20 bp, Artificial Sequence
  Description of Artificial Sequence: Synthetic oligonucleotide
  Target: ANGPTL4; (+) strand; PAM type: YTN; PAM sequence: CTT
agcacccgggccggacagcg

SEQ ID NO: 18541 - DNA, 20 bp, Artificial Sequence
  Description of Artificial Sequence: Synthetic oligonucleotide
  Target: ANGPTL4; (+) strand; PAM type: YTN; PAM sequence: TTA
gcacccgggccggacagcgg

SEQ ID NO: 18542 - DNA, 20 bp, Artificial Sequence
  Description of Artificial Sequence: Synthetic oligonucleotide
  Target: ANGPTL4; (+) strand; PAM type: YTN; PAM sequence: CTG
cggagggtgtactgggtccc

SEQ ID NO: 18543 - DNA, 20 bp, Artificial Sequence
  Description of Artificial Sequence: Synthetic oligonucleotide
  Target: ANGPTL4; (+) strand; PAM type: YTN; PAM sequence: CTG
ggtcccccagcagtgccagc

SEQ ID NO: 18544 - DNA, 20 bp, Artificial Sequence
  Description of Artificial Sequence: Synthetic oligonucleotide
  Target: ANGPTL4; (+) strand; PAM type: YTN; PAM sequence: CTG
cgcttgatttctcaccaggc

SEQ ID NO: 18545 - DNA, 20 bp, Artificial Sequence
  Description of Artificial Sequence: Synthetic oligonucleotide
  Target: ANGPTL4; (+) strand; PAM type: YTN; PAM sequence: CTT
gatttctcaccaggccttag

SEQ ID NO: 18546 - DNA, 20 bp, Artificial Sequence
  Description of Artificial Sequence: Synthetic oligonucleotide
  Target: ANGPTL4; (+) strand; PAM type: YTN; PAM sequence: TTG
atttctcaccaggccttagc

SEQ ID NO: 18547 - DNA, 20 bp, Artificial Sequence
  Description of Artificial Sequence: Synthetic oligonucleotide
  Target: ANGPTL4; (+) strand; PAM type: YTN; PAM sequence: TTT
ctcaccaggccttagctgcc

SEQ ID NO: 18548 - DNA, 20 bp, Artificial Sequence
  Description of Artificial Sequence: Synthetic oligonucleotide
  Target: ANGPTL4; (+) strand; PAM type: YTN; PAM sequence: TTC
tcaccaggccttagctgcct

SEQ ID NO: 18549 - DNA, 20 bp, Artificial Sequence
  Description of Artificial Sequence: Synthetic oligonucleotide
  Target: ANGPTL4; (+) strand; PAM type: YTN; PAM sequence: CTC
accaggccttagctgccttc

SEQ ID NO: 18550 - DNA, 20 bp, Artificial Sequence
  Description of Artificial Sequence: Synthetic oligonucleotide
  Target: ANGPTL4; (+) strand; PAM type: YTN; PAM sequence: CTT
agctgccttcccgcggggca

SEQ ID NO: 18551 - DNA, 20 bp, Artificial Sequence
  Description of Artificial Sequence: Synthetic oligonucleotide
  Target: ANGPTL4; (+) strand; PAM type: YTN; PAM sequence: TTA
gctgccttcccgcggggcag

SEQ ID NO: 18552 - DNA, 20 bp, Artificial Sequence
  Description of Artificial Sequence: Synthetic oligonucleotide
  Target: ANGPTL4; (+) strand; PAM type: YTN; PAM sequence: CTG
ccttcccgcggggcagggat

SEQ ID NO: 18553 - DNA, 20 bp, Artificial Sequence
  Description of Artificial Sequence: Synthetic oligonucleotide
  Target: ANGPTL4; (+) strand; PAM type: YTN; PAM sequence: CTT
cccgcggggcagggatcggg

SEQ ID NO: 18554 - DNA, 20 bp, Artificial Sequence
  Description of Artificial Sequence: Synthetic oligonucleotide
  Target: ANGPTL4; (+) strand; PAM type: YTN; PAM sequence: TTC
ccgcggggcagggatcggga

SEQ ID NO: 18555 - DNA, 20 bp, Artificial Sequence
  Description of Artificial Sequence: Synthetic oligonucleotide
  Target: ANGPTL4; (+) strand; PAM type: YTN; PAM sequence: CTG
cagcccgccatgcctgagcc

SEQ ID NO: 18556 - DNA, 20 bp, Artificial Sequence
  Description of Artificial Sequence: Synthetic oligonucleotide
  Target: ANGPTL4; (+) strand; PAM type: YTN; PAM sequence: CTG
agcctcccaccccctccatg

SEQ ID NO: 18557 - DNA, 20 bp, Artificial Sequence
  Description of Artificial Sequence: Synthetic oligonucleotide
  Target: ANGPTL4; (+) strand; PAM type: YTN; PAM sequence: CTC
ccaccccctccatgggctcc

SEQ ID NO: 18558 - DNA, 20 bp, Artificial Sequence
  Description of Artificial Sequence: Synthetic oligonucleotide
  Target: ANGPTL4; (+) strand; PAM type: YTN; PAM sequence: CTC
catgggctcctgtgcggccc

SEQ ID NO: 18559 - DNA, 20 bp, Artificial Sequence
  Description of Artificial Sequence: Synthetic oligonucleotide
  Target: ANGPTL4; (+) strand; PAM type: YTN; PAM sequence: CTC
ctgtgcggcccgcgcctccc

SEQ ID NO: 18560 - DNA, 20 bp, Artificial Sequence
  Description of Artificial Sequence: Synthetic oligonucleotide
  Target: ANGPTL4; (+) strand; PAM type: YTN; PAM sequence: CTG
tgcggcccgcgcctccctga

SEQ ID NO: 18561 - DNA, 20 bp, Artificial Sequence
  Description of Artificial Sequence: Synthetic oligonucleotide
  Target: ANGPTL4; (+) strand; PAM type: YTN; PAM sequence: CTC
cctgacgagcactgccccat

SEQ ID NO: 18562 - DNA, 20 bp, Artificial Sequence
  Description of Artificial Sequence: Synthetic oligonucleotide
  Target: ANGPTL4; (+) strand; PAM type: YTN; PAM sequence: CTG
acgagcactgccccatgctc

SEQ ID NO: 18563 - DNA, 20 bp, Artificial Sequence
  Description of Artificial Sequence: Synthetic oligonucleotide
  Target: ANGPTL4; (+) strand; PAM type: YTN; PAM sequence: CTG
ccccatgctccatggtgccc

SEQ ID NO: 18564 - DNA, 20 bp, Artificial Sequence
  Description of Artificial Sequence: Synthetic oligonucleotide
  Target: ANGPTL4; (+) strand; PAM type: YTN; PAM sequence: CTC
catggtgcccagtcccatcc

SEQ ID NO: 18565 - DNA, 20 bp, Artificial Sequence
  Description of Artificial Sequence: Synthetic oligonucleotide
  Target: ANGPTL4; (+) strand; PAM type: YTN; PAM sequence: CTG
aggagtgcaggcgcacggcg

SEQ ID NO: 18566 - DNA, 20 bp, Artificial Sequence
  Description of Artificial Sequence: Synthetic oligonucleotide
  Target: ANGPTL4; (+) strand; PAM type: YTN; PAM sequence: CTG
gcaggcagctccacctgcag

SEQ ID NO: 18567 - DNA, 20 bp, Artificial Sequence
  Description of Artificial Sequence: Synthetic oligonucleotide
  Target: ANGPTL4; (+) strand; PAM type: YTN; PAM sequence: CTC
cacctgcagccccggtgcag

SEQ ID NO: 18568 - DNA, 20 bp, Artificial Sequence
  Description of Artificial Sequence: Synthetic oligonucleotide
  Target: ANGPTL4; (+) strand; PAM type: YTN; PAM sequence: CTG
cagccccggtgcaggatcca

SEQ ID NO: 18569 - DNA, 20 bp, Artificial Sequence
  Description of Artificial Sequence: Synthetic oligonucleotide
  Target: ANGPTL4; (+) strand; PAM type: YTN; PAM sequence: CTG
ggtgaagctagctgggctcc

SEQ ID NO: 18570 - DNA, 20 bp, Artificial Sequence
  Description of Artificial Sequence: Synthetic oligonucleotide
  Target: ANGPTL4; (+) strand; PAM type: YTN; PAM sequence: CTA
gctgggctcctgagtctggt

SEQ ID NO: 18571 - DNA, 20 bp, Artificial Sequence
  Description of Artificial Sequence: Synthetic oligonucleotide
  Target: ANGPTL4; (+) strand; PAM type: YTN; PAM sequence: CTG
ggctcctgagtctggtgggg

SEQ ID NO: 18572 - DNA, 20 bp, Artificial Sequence
  Description of Artificial Sequence: Synthetic oligonucleotide
  Target: ANGPTL4; (+) strand; PAM type: YTN; PAM sequence: CTC
ctgagtctggtggggacgtg

SEQ ID NO: 18573 - DNA, 20 bp, Artificial Sequence
  Description of Artificial Sequence: Synthetic oligonucleotide
  Target: ANGPTL4; (+) strand; PAM type: YTN; PAM sequence: CTG
agtctggtggggacgtggag

SEQ ID NO: 18574 - DNA, 20 bp, Artificial Sequence
  Description of Artificial Sequence: Synthetic oligonucleotide
  Target: ANGPTL4; (+) strand; PAM type: YTN; PAM sequence: CTG
gtggggacgtggagaacctt

SEQ ID NO: 18575 - DNA, 20 bp, Artificial Sequence
  Description of Artificial Sequence: Synthetic oligonucleotide
  Target: ANGPTL4; (+) strand; PAM type: YTN; PAM sequence: CTT
tgtctagctcagggattgta

SEQ ID NO: 18576 - DNA, 20 bp, Artificial Sequence
  Description of Artificial Sequence: Synthetic oligonucleotide
  Target: ANGPTL4; (+) strand; PAM type: YTN; PAM sequence: TTT
gtctagctcagggattgtaa

SEQ ID NO: 18577 - DNA, 20 bp, Artificial Sequence
  Description of Artificial Sequence: Synthetic oligonucleotide
  Target: ANGPTL4; (+) strand; PAM type: YTN; PAM sequence: TTG
tctagctcagggattgtaaa

SEQ ID NO: 18578 - DNA, 20 bp, Artificial Sequence
  Description of Artificial Sequence: Synthetic oligonucleotide
  Target: ANGPTL4; (+) strand; PAM type: YTN; PAM sequence: CTA
gctcagggattgtaaataca

SEQ ID NO: 18579 - DNA, 20 bp, Artificial Sequence
  Description of Artificial Sequence: Synthetic oligonucleotide
  Target: ANGPTL4; (+) strand; PAM type: YTN; PAM sequence: CTC
agggattgtaaatacaccaa

SEQ ID NO: 18580 - DNA, 20 bp, Artificial Sequence
  Description of Artificial Sequence: Synthetic oligonucleotide
  Target: ANGPTL4; (+) strand; PAM type: YTN; PAM sequence: TTG
taaatacaccaatcatcacc

SEQ ID NO: 18581 - DNA, 20 bp, Artificial Sequence
  Description of Artificial Sequence: Synthetic oligonucleotide
  Target: ANGPTL4; (+) strand; PAM type: YTN; PAM sequence: CTA
tgtctagctcagggtttgtg

SEQ ID NO: 18582 - DNA, 20 bp, Artificial Sequence
  Description of Artificial Sequence: Synthetic oligonucleotide
  Target: ANGPTL4; (+) strand; PAM type: YTN; PAM sequence: CTA
gctcagggtttgtgaatgca

SEQ ID NO: 18583 - DNA, 20 bp, Artificial Sequence
  Description of Artificial Sequence: Synthetic oligonucleotide
  Target: ANGPTL4; (+) strand; PAM type: YTN; PAM sequence: CTC
agggtttgtgaatgcaccaa

SEQ ID NO: 18584 - DNA, 20 bp, Artificial Sequence
  Description of Artificial Sequence: Synthetic oligonucleotide
  Target: ANGPTL4; (+) strand; PAM type: YTN; PAM sequence: TTT
gtgaatgcaccaatgaacac

SEQ ID NO: 18585 - DNA, 20 bp, Artificial Sequence
  Description of Artificial Sequence: Synthetic oligonucleotide
  Target: ANGPTL4; (+) strand; PAM type: YTN; PAM sequence: TTG
tgaatgcaccaatgaacact

SEQ ID NO: 18586 - DNA, 20 bp, Artificial Sequence
  Description of Artificial Sequence: Synthetic oligonucleotide
  Target: ANGPTL4; (+) strand; PAM type: YTN; PAM sequence: CTC
tgtatctagctactctggtg

SEQ ID NO: 18587 - DNA, 20 bp, Artificial Sequence
  Description of Artificial Sequence: Synthetic oligonucleotide
  Target: ANGPTL4; (+) strand; PAM type: YTN; PAM sequence: CTG
tatctagctactctggtggg

SEQ ID NO: 18588 - DNA, 20 bp, Artificial Sequence
  Description of Artificial Sequence: Synthetic oligonucleotide
  Target: ANGPTL4; (+) strand; PAM type: YTN; PAM sequence: CTA
gctactctggtggggccttg

SEQ ID NO: 18589 - DNA, 20 bp, Artificial Sequence
  Description of Artificial Sequence: Synthetic oligonucleotide
  Target: ANGPTL4; (+) strand; PAM type: YTN; PAM sequence: CTA
ctctggtggggccttggaga

SEQ ID NO: 18590 - DNA, 20 bp, Artificial Sequence
  Description of Artificial Sequence: Synthetic oligonucleotide
  Target: ANGPTL4; (+) strand; PAM type: YTN; PAM sequence: CTC
tggtggggccttggagaacc

SEQ ID NO: 18591 - DNA, 20 bp, Artificial Sequence
  Description of Artificial Sequence: Synthetic oligonucleotide
  Target: ANGPTL4; (+) strand; PAM type: YTN; PAM sequence: CTG
gtggggccttggagaacctt

SEQ ID NO: 18592 - DNA, 20 bp, Artificial Sequence
  Description of Artificial Sequence: Synthetic oligonucleotide
  Target: ANGPTL4; (+) strand; PAM type: YTN; PAM sequence: CTT
ggagaacctttatgtctagc

SEQ ID NO: 18593 - DNA, 20 bp, Artificial Sequence
  Description of Artificial Sequence: Synthetic oligonucleotide
  Target: ANGPTL4; (+) strand; PAM type: YTN; PAM sequence: TTG
gagaacctttatgtctagct

SEQ ID NO: 18594 - DNA, 20 bp, Artificial Sequence
  Description of Artificial Sequence: Synthetic oligonucleotide
  Target: ANGPTL4; (+) strand; PAM type: YTN; PAM sequence: CTT
tatgtctagctcagggattg

SEQ ID NO: 18595 - DNA, 20 bp, Artificial Sequence
  Description of Artificial Sequence: Synthetic oligonucleotide
  Target: ANGPTL4; (+) strand; PAM type: YTN; PAM sequence: TTT
atgtctagctcagggattgt

SEQ ID NO: 18596 - DNA, 20 bp, Artificial Sequence
  Description of Artificial Sequence: Synthetic oligonucleotide
  Target: ANGPTL4; (+) strand; PAM type: YTN; PAM sequence: TTA
tgtctagctcagggattgta

SEQ ID NO: 18597 - DNA, 20 bp, Artificial Sequence
  Description of Artificial Sequence: Synthetic oligonucleotide
  Target: ANGPTL4; (+) strand; PAM type: YTN; PAM sequence: CTA
gctcagggattgtaaataca

SEQ ID NO: 18598 - DNA, 20 bp, Artificial Sequence
  Description of Artificial Sequence: Synthetic oligonucleotide
  Target: ANGPTL4; (+) strand; PAM type: YTN; PAM sequence: CTC
agggattgtaaatacaccaa

SEQ ID NO: 18599 - DNA, 20 bp, Artificial Sequence
  Description of Artificial Sequence: Synthetic oligonucleotide
  Target: ANGPTL4; (+) strand; PAM type: YTN; PAM sequence: TTG
taaatacaccaatcggcact

SEQ ID NO: 18600 - DNA, 20 bp, Artificial Sequence
  Description of Artificial Sequence: Synthetic oligonucleotide
  Target: ANGPTL4; (+) strand; PAM type: YTN; PAM sequence: CTC
tgtatctagctcaaggtttg

SEQ ID NO: 18601 - DNA, 20 bp, Artificial Sequence
  Description of Artificial Sequence: Synthetic oligonucleotide
  Target: ANGPTL4; (+) strand; PAM type: YTN; PAM sequence: CTG
tatctagctcaaggtttgta

SEQ ID NO: 18602 - DNA, 20 bp, Artificial Sequence
  Description of Artificial Sequence: Synthetic oligonucleotide
  Target: ANGPTL4; (+) strand; PAM type: YTN; PAM sequence: CTA
gctcaaggtttgtaaacaca

SEQ ID NO: 18603 - DNA, 20 bp, Artificial Sequence
  Description of Artificial Sequence: Synthetic oligonucleotide
  Target: ANGPTL4; (+) strand; PAM type: YTN; PAM sequence: CTC
aaggtttgtaaacacaccaa

SEQ ID NO: 18604 - DNA, 20 bp, Artificial Sequence
  Description of Artificial Sequence: Synthetic oligonucleotide
  Target: ANGPTL4; (+) strand; PAM type: YTN; PAM sequence: TTT
gtaaacacaccaatcagcac

SEQ ID NO: 18605 - DNA, 20 bp, Artificial Sequence
  Description of Artificial Sequence: Synthetic oligonucleotide
  Target: ANGPTL4; (+) strand; PAM type: YTN; PAM sequence: TTG
taaacacaccaatcagcacc

SEQ ID NO: 18606 - DNA, 20 bp, Artificial Sequence
  Description of Artificial Sequence: Synthetic oligonucleotide
  Target: ANGPTL4; (+) strand; PAM type: YTN; PAM sequence: CTG
tgtctagctcagggtttgtg

SEQ ID NO: 18607 - DNA, 20 bp, Artificial Sequence
  Description of Artificial Sequence: Synthetic oligonucleotide
  Target: ANGPTL4; (+) strand; PAM type: YTN; PAM sequence: CTA
gctcagggtttgtgaatgca

SEQ ID NO: 18608 - DNA, 20 bp, Artificial Sequence
  Description of Artificial Sequence: Synthetic oligonucleotide
  Target: ANGPTL4; (+) strand; PAM type: YTN; PAM sequence: CTC
agggtttgtgaatgcaccaa

SEQ ID NO: 18609 - DNA, 20 bp, Artificial Sequence
  Description of Artificial Sequence: Synthetic oligonucleotide
  Target: ANGPTL4; (+) strand; PAM type: YTN; PAM sequence: TTT
gtgaatgcaccaatcgacac

SEQ ID NO: 18610 - DNA, 20 bp, Artificial Sequence
  Description of Artificial Sequence: Synthetic oligonucleotide
  Target: ANGPTL4; (+) strand; PAM type: YTN; PAM sequence: TTG
tgaatgcaccaatcgacact

SEQ ID NO: 18611 - DNA, 20 bp, Artificial Sequence
  Description of Artificial Sequence: Synthetic oligonucleotide
  Target: ANGPTL4; (+) strand; PAM type: YTN; PAM sequence: CTC
tgtatctagctactgtggtg

SEQ ID NO: 18612 - DNA, 20 bp, Artificial Sequence
  Description of Artificial Sequence: Synthetic oligonucleotide
  Target: ANGPTL4; (+) strand; PAM type: YTN; PAM sequence: CTG
tatctagctactgtggtggg

SEQ ID NO: 18613 - DNA, 20 bp, Artificial Sequence
  Description of Artificial Sequence: Synthetic oligonucleotide
  Target: ANGPTL4; (+) strand; PAM type: YTN; PAM sequence: CTA
gctactgtggtggggccttg

SEQ ID NO: 18614 - DNA, 20 bp, Artificial Sequence
  Description of Artificial Sequence: Synthetic oligonucleotide
  Target: ANGPTL4; (+) strand; PAM type: YTN; PAM sequence: CTA
ctgtggtggggccttggaga

SEQ ID NO: 18615 - DNA, 20 bp, Artificial Sequence
  Description of Artificial Sequence: Synthetic oligonucleotide
  Target: ANGPTL4; (+) strand; PAM type: YTN; PAM sequence: CTG
tggtggggccttggagaacc

SEQ ID NO: 18616 - DNA, 20 bp, Artificial Sequence
  Description of Artificial Sequence: Synthetic oligonucleotide
  Target: ANGPTL4; (+) strand; PAM type: YTN; PAM sequence: CTT
ggagaacctttgtgttgaca

SEQ ID NO: 18617 - DNA, 20 bp, Artificial Sequence
  Description of Artificial Sequence: Synthetic oligonucleotide
  Target: ANGPTL4; (+) strand; PAM type: YTN; PAM sequence: TTG
gagaacctttgtgttgacac

SEQ ID NO: 18618 - DNA, 20 bp, Artificial Sequence
  Description of Artificial Sequence: Synthetic oligonucleotide
  Target: ANGPTL4; (+) strand; PAM type: YTN; PAM sequence: CTT
tgtgttgacactctgtatct

SEQ ID NO: 18619 - DNA, 20 bp, Artificial Sequence
  Description of Artificial Sequence: Synthetic oligonucleotide
  Target: ANGPTL4; (+) strand; PAM type: YTN; PAM sequence: TTT
gtgttgacactctgtatcta

SEQ ID NO: 18620 - DNA, 20 bp, Artificial Sequence
  Description of Artificial Sequence: Synthetic oligonucleotide
  Target: ANGPTL4; (+) strand; PAM type: YTN; PAM sequence: TTG
tgttgacactctgtatctag

SEQ ID NO: 18621 - DNA, 20 bp, Artificial Sequence
  Description of Artificial Sequence: Synthetic oligonucleotide
  Target: ANGPTL4; (+) strand; PAM type: YTN; PAM sequence: TTG
acactctgtatctagttaat

SEQ ID NO: 18622 - DNA, 20 bp, Artificial Sequence
  Description of Artificial Sequence: Synthetic oligonucleotide
  Target: ANGPTL4; (+) strand; PAM type: YTN; PAM sequence: CTC
tgtatctagttaatctggtg

SEQ ID NO: 18623 - DNA, 20 bp, Artificial Sequence
  Description of Artificial Sequence: Synthetic oligonucleotide
  Target: ANGPTL4; (+) strand; PAM type: YTN; PAM sequence: CTG
tatctagttaatctggtggg

SEQ ID NO: 18624 - DNA, 20 bp, Artificial Sequence
  Description of Artificial Sequence: Synthetic oligonucleotide
  Target: ANGPTL4; (+) strand; PAM type: YTN; PAM sequence: CTA
gttaatctggtggggatgtg

SEQ ID NO: 18625 - DNA, 20 bp, Artificial Sequence
  Description of Artificial Sequence: Synthetic oligonucleotide
  Target: ANGPTL4; (+) strand; PAM type: YTN; PAM sequence: TTA
atctggtggggatgtggaga

SEQ ID NO: 18626 - DNA, 20 bp, Artificial Sequence
  Description of Artificial Sequence: Synthetic oligonucleotide
  Target: ANGPTL4; (+) strand; PAM type: YTN; PAM sequence: CTG
gtggggatgtggagaacctt

SEQ ID NO: 18627 - DNA, 20 bp, Artificial Sequence
  Description of Artificial Sequence: Synthetic oligonucleotide
  Target: ANGPTL4; (+) strand; PAM type: YTN; PAM sequence: CTT
tgtgtctagctcaggaattg

SEQ ID NO: 18628 - DNA, 20 bp, Artificial Sequence
  Description of Artificial Sequence: Synthetic oligonucleotide
  Target: ANGPTL4; (+) strand; PAM type: YTN; PAM sequence: TTT
gtgtctagctcaggaattgt

SEQ ID NO: 18629 - DNA, 20 bp, Artificial Sequence
  Description of Artificial Sequence: Synthetic oligonucleotide
  Target: ANGPTL4; (+) strand; PAM type: YTN; PAM sequence: TTG
tgtctagctcaggaattgta

SEQ ID NO: 18630 - DNA, 20 bp, Artificial Sequence
  Description of Artificial Sequence: Synthetic oligonucleotide
  Target: ANGPTL4; (+) strand; PAM type: YTN; PAM sequence: CTA
gctcaggaattgtaaacgca

SEQ ID NO: 18631 - DNA, 20 bp, Artificial Sequence
  Description of Artificial Sequence: Synthetic oligonucleotide
  Target: ANGPTL4; (+) strand; PAM type: YTN; PAM sequence: CTC
aggaattgtaaacgcaccaa

SEQ ID NO: 18632 - DNA, 20 bp, Artificial Sequence
  Description of Artificial Sequence: Synthetic oligonucleotide
  Target: ANGPTL4; (+) strand; PAM type: YTN; PAM sequence: TTG
taaacgcaccaatcagcgcc

SEQ ID NO: 18633 - DNA, 20 bp, Artificial Sequence
  Description of Artificial Sequence: Synthetic oligonucleotide
  Target: ANGPTL4; (+) strand; PAM type: YTN; PAM sequence: CTG
tcaaaacagaccagtgggct

SEQ ID NO: 18634 - DNA, 20 bp, Artificial Sequence
  Description of Artificial Sequence: Synthetic oligonucleotide
  Target: ANGPTL4; (+) strand; PAM type: YTN; PAM sequence: CTC
taccaatcagcaggatgtgg

SEQ ID NO: 18635 - DNA, 20 bp, Artificial Sequence
  Description of Artificial Sequence: Synthetic oligonucleotide
  Target: ANGPTL4; (+) strand; PAM type: YTN; PAM sequence: CTA
ccaatcagcaggatgtgggt

SEQ ID NO: 18636 - DNA, 20 bp, Artificial Sequence
  Description of Artificial Sequence: Synthetic oligonucleotide
  Target: ANGPTL4; (+) strand; PAM type: YTN; PAM sequence: CTG
cccgagccagcagtggcaac

SEQ ID NO: 18637 - DNA, 20 bp, Artificial Sequence
  Description of Artificial Sequence: Synthetic oligonucleotide
  Target: ANGPTL4; (+) strand; PAM type: YTN; PAM sequence: CTT
gggtccccttccacactgtg

SEQ ID NO: 18638 - DNA, 20 bp, Artificial Sequence
  Description of Artificial Sequence: Synthetic oligonucleotide
  Target: ANGPTL4; (+) strand; PAM type: YTN; PAM sequence: TTG
ggtccccttccacactgtgg

SEQ ID NO: 18639 - DNA, 20 bp, Artificial Sequence
  Description of Artificial Sequence: Synthetic oligonucleotide
  Target: ANGPTL4; (+) strand; PAM type: YTN; PAM sequence: CTT
ccacactgtggaagctttgt

SEQ ID NO: 18640 - DNA, 20 bp, Artificial Sequence
  Description of Artificial Sequence: Synthetic oligonucleotide
  Target: ANGPTL4; (+) strand; PAM type: YTN; PAM sequence: TTC
cacactgtggaagctttgtt

SEQ ID NO: 18641 - DNA, 20 bp, Artificial Sequence
  Description of Artificial Sequence: Synthetic oligonucleotide
  Target: ANGPTL4; (+) strand; PAM type: YTN; PAM sequence: CTG
tggaagctttgttcttttgc

SEQ ID NO: 18642 - DNA, 20 bp, Artificial Sequence
  Description of Artificial Sequence: Synthetic oligonucleotide
  Target: ANGPTL4; (+) strand; PAM type: YTN; PAM sequence: CTT
tgttcttttgctctttgcaa

SEQ ID NO: 18643 - DNA, 20 bp, Artificial Sequence
  Description of Artificial Sequence: Synthetic oligonucleotide
  Target: ANGPTL4; (+) strand; PAM type: YTN; PAM sequence: TTT
gttcttttgctctttgcaat

SEQ ID NO: 18644 - DNA, 20 bp, Artificial Sequence
  Description of Artificial Sequence: Synthetic oligonucleotide
  Target: ANGPTL4; (+) strand; PAM type: YTN; PAM sequence: TTG
ttcttttgctctttgcaata

SEQ ID NO: 18645 - DNA, 20 bp, Artificial Sequence
  Description of Artificial Sequence: Synthetic oligonucleotide
  Target: ANGPTL4; (+) strand; PAM type: YTN; PAM sequence: TTC
ttttgctctttgcaataaat

SEQ ID NO: 18646 - DNA, 20 bp, Artificial Sequence
  Description of Artificial Sequence: Synthetic oligonucleotide
  Target: ANGPTL4; (+) strand; PAM type: YTN; PAM sequence: CTT
ttgctctttgcaataaatct

SEQ ID NO: 18647 - DNA, 20 bp, Artificial Sequence
  Description of Artificial Sequence: Synthetic oligonucleotide
  Target: ANGPTL4; (+) strand; PAM type: YTN; PAM sequence: TTT
tgctctttgcaataaatctt

SEQ ID NO: 18648 - DNA, 20 bp, Artificial Sequence
  Description of Artificial Sequence: Synthetic oligonucleotide
  Target: ANGPTL4; (+) strand; PAM type: YTN; PAM sequence: TTT
gctctttgcaataaatcttg

SEQ ID NO: 18649 - DNA, 20 bp, Artificial Sequence
  Description of Artificial Sequence: Synthetic oligonucleotide
  Target: ANGPTL4; (+) strand; PAM type: YTN; PAM sequence: TTG
ctctttgcaataaatcttgt

SEQ ID NO: 18650 - DNA, 20 bp, Artificial Sequence
  Description of Artificial Sequence: Synthetic oligonucleotide
  Target: ANGPTL4; (+) strand; PAM type: YTN; PAM sequence: CTC
tttgcaataaatcttgtact

SEQ ID NO: 18651 - DNA, 20 bp, Artificial Sequence
  Description of Artificial Sequence: Synthetic oligonucleotide
  Target: ANGPTL4; (+) strand; PAM type: YTN; PAM sequence: CTT
tgcaataaatcttgtactgc

SEQ ID NO: 18652 - DNA, 20 bp, Artificial Sequence
  Description of Artificial Sequence: Synthetic oligonucleotide
  Target: ANGPTL4; (+) strand; PAM type: YTN; PAM sequence: TTT
gcaataaatcttgtactgct

SEQ ID NO: 18653 - DNA, 20 bp, Artificial Sequence
  Description of Artificial Sequence: Synthetic oligonucleotide
  Target: ANGPTL4; (+) strand; PAM type: YTN; PAM sequence: TTG
caataaatcttgtactgctc

SEQ ID NO: 18654 - DNA, 20 bp, Artificial Sequence
  Description of Artificial Sequence: Synthetic oligonucleotide
  Target: ANGPTL4; (+) strand; PAM type: YTN; PAM sequence: CTT
gtactgctcactctttgggt

SEQ ID NO: 18655 - DNA, 20 bp, Artificial Sequence
  Description of Artificial Sequence: Synthetic oligonucleotide
  Target: ANGPTL4; (+) strand; PAM type: YTN; PAM sequence: TTG
tactgctcactctttgggtc

SEQ ID NO: 18656 - DNA, 20 bp, Artificial Sequence
  Description of Artificial Sequence: Synthetic oligonucleotide
  Target: ANGPTL4; (+) strand; PAM type: YTN; PAM sequence: CTG
ctcactctttgggtccccac

SEQ ID NO: 18657 - DNA, 20 bp, Artificial Sequence
  Description of Artificial Sequence: Synthetic oligonucleotide
  Target: ANGPTL4; (+) strand; PAM type: YTN; PAM sequence: CTC
actctttgggtccccactgc

SEQ ID NO: 18658 - DNA, 20 bp, Artificial Sequence
  Description of Artificial Sequence: Synthetic oligonucleotide
  Target: ANGPTL4; (+) strand; PAM type: YTN; PAM sequence: CTC
tttgggtccccactgctttt

SEQ ID NO: 18659 - DNA, 20 bp, Artificial Sequence
  Description of Artificial Sequence: Synthetic oligonucleotide
  Target: ANGPTL4; (+) strand; PAM type: YTN; PAM sequence: CTT
tgggtccccactgcttttat

SEQ ID NO: 18660 - DNA, 20 bp, Artificial Sequence
  Description of Artificial Sequence: Synthetic oligonucleotide
  Target: ANGPTL4; (+) strand; PAM type: YTN; PAM sequence: TTT
gggtccccactgcttttatg

SEQ ID NO: 18661 - DNA, 20 bp, Artificial Sequence
  Description of Artificial Sequence: Synthetic oligonucleotide
  Target: ANGPTL4; (+) strand; PAM type: YTN; PAM sequence: TTG
ggtccccactgcttttatga

SEQ ID NO: 18662 - DNA, 20 bp, Artificial Sequence
  Description of Artificial Sequence: Synthetic oligonucleotide
  Target: ANGPTL4; (+) strand; PAM type: YTN; PAM sequence: CTG
cttttatgagctgtaacact

SEQ ID NO: 18663 - DNA, 20 bp, Artificial Sequence
  Description of Artificial Sequence: Synthetic oligonucleotide
  Target: ANGPTL4; (+) strand; PAM type: YTN; PAM sequence: CTT
ttatgagctgtaacactcac

SEQ ID NO: 18664 - DNA, 20 bp, Artificial Sequence
  Description of Artificial Sequence: Synthetic oligonucleotide
  Target: ANGPTL4; (+) strand; PAM type: YTN; PAM sequence: TTT
tatgagctgtaacactcact

SEQ ID NO: 18665 - DNA, 20 bp, Artificial Sequence
  Description of Artificial Sequence: Synthetic oligonucleotide
  Target: ANGPTL4; (+) strand; PAM type: YTN; PAM sequence: TTT
atgagctgtaacactcactg

SEQ ID NO: 18666 - DNA, 20 bp, Artificial Sequence
  Description of Artificial Sequence: Synthetic oligonucleotide
  Target: ANGPTL4; (+) strand; PAM type: YTN; PAM sequence: TTA
tgagctgtaacactcactgc

SEQ ID NO: 18667 - DNA, 20 bp, Artificial Sequence
  Description of Artificial Sequence: Synthetic oligonucleotide
  Target: ANGPTL4; (+) strand; PAM type: YTN; PAM sequence: CTG
taacactcactgcgaaggtc

SEQ ID NO: 18668 - DNA, 20 bp, Artificial Sequence
  Description of Artificial Sequence: Synthetic oligonucleotide
  Target: ANGPTL4; (+) strand; PAM type: YTN; PAM sequence: CTC
actgcgaaggtctgcagctt

SEQ ID NO: 18669 - DNA, 20 bp, Artificial Sequence
  Description of Artificial Sequence: Synthetic oligonucleotide
  Target: ANGPTL4; (+) strand; PAM type: YTN; PAM sequence: CTG
cgaaggtctgcagcttcact

SEQ ID NO: 18670 - DNA, 20 bp, Artificial Sequence
  Description of Artificial Sequence: Synthetic oligonucleotide
  Target: ANGPTL4; (+) strand; PAM type: YTN; PAM sequence: CTG
cagcttcactcctgagccag

SEQ ID NO: 18671 - DNA, 20 bp, Artificial Sequence
  Description of Artificial Sequence: Synthetic oligonucleotide
  Target: ANGPTL4; (+) strand; PAM type: YTN; PAM sequence: CTT
cactcctgagccagtgaaac

SEQ ID NO: 18672 - DNA, 20 bp, Artificial Sequence
  Description of Artificial Sequence: Synthetic oligonucleotide
  Target: ANGPTL4; (+) strand; PAM type: YTN; PAM sequence: TTC
actcctgagccagtgaaacc

SEQ ID NO: 18673 - DNA, 20 bp, Artificial Sequence
  Description of Artificial Sequence: Synthetic oligonucleotide
  Target: ANGPTL4; (+) strand; PAM type: YTN; PAM sequence: CTC
ctgagccagtgaaaccatga

SEQ ID NO: 18674 - DNA, 20 bp, Artificial Sequence
  Description of Artificial Sequence: Synthetic oligonucleotide
  Target: ANGPTL4; (+) strand; PAM type: YTN; PAM sequence: CTG
agccagtgaaaccatgaacc

SEQ ID NO: 18675 - DNA, 20 bp, Artificial Sequence
  Description of Artificial Sequence: Synthetic oligonucleotide
  Target: ANGPTL4; (+) strand; PAM type: YTN; PAM sequence: CTG
aacacacctgaacatcagaa

SEQ ID NO: 18676 - DNA, 20 bp, Artificial Sequence
  Description of Artificial Sequence: Synthetic oligonucleotide
  Target: ANGPTL4; (+) strand; PAM type: YTN; PAM sequence: CTG
aacatcagaagaaacaaact

SEQ ID NO: 18677 - DNA, 20 bp, Artificial Sequence
  Description of Artificial Sequence: Synthetic oligonucleotide
  Target: ANGPTL4; (+) strand; PAM type: YTN; PAM sequence: CTC
cagacgcgccaccttaagag

SEQ ID NO: 18678 - DNA, 20 bp, Artificial Sequence
  Description of Artificial Sequence: Synthetic oligonucleotide
  Target: ANGPTL4; (+) strand; PAM type: YTN; PAM sequence: CTT
aagagctggaacacttaccg

SEQ ID NO: 18679 - DNA, 20 bp, Artificial Sequence
  Description of Artificial Sequence: Synthetic oligonucleotide
  Target: ANGPTL4; (+) strand; PAM type: YTN; PAM sequence: TTA
agagctggaacacttaccgc

SEQ ID NO: 18680 - DNA, 20 bp, Artificial Sequence
  Description of Artificial Sequence: Synthetic oligonucleotide
  Target: ANGPTL4; (+) strand; PAM type: YTN; PAM sequence: CTG
gaacacttaccgcaagggtc

SEQ ID NO: 18681 - DNA, 20 bp, Artificial Sequence
  Description of Artificial Sequence: Synthetic oligonucleotide
  Target: ANGPTL4; (+) strand; PAM type: YTN; PAM sequence: CTT
accgcaagggtccatggctt

SEQ ID NO: 18682 - DNA, 20 bp, Artificial Sequence
  Description of Artificial Sequence: Synthetic oligonucleotide
  Target: ANGPTL4; (+) strand; PAM type: YTN; PAM sequence: TTA
ccgcaagggtccatggcttc

SEQ ID NO: 18683 - DNA, 20 bp, Artificial Sequence
  Description of Artificial Sequence: Synthetic oligonucleotide
  Target: ANGPTL4; (+) strand; PAM type: YTN; PAM sequence: CTT
cattcttgaagtcagtgaga

SEQ ID NO: 18684 - DNA, 20 bp, Artificial Sequence
  Description of Artificial Sequence: Synthetic oligonucleotide
  Target: ANGPTL4; (+) strand; PAM type: YTN; PAM sequence: TTC
attcttgaagtcagtgagac

SEQ ID NO: 18685 - DNA, 20 bp, Artificial Sequence
  Description of Artificial Sequence: Synthetic oligonucleotide
  Target: ANGPTL4; (+) strand; PAM type: YTN; PAM sequence: TTC
ttgaagtcagtgagaccaag

SEQ ID NO: 18686 - DNA, 20 bp, Artificial Sequence
  Description of Artificial Sequence: Synthetic oligonucleotide
  Target: ANGPTL4; (+) strand; PAM type: YTN; PAM sequence: CTT
gaagtcagtgagaccaagaa

SEQ ID NO: 18687 - DNA, 20 bp, Artificial Sequence
  Description of Artificial Sequence: Synthetic oligonucleotide
  Target: ANGPTL4; (+) strand; PAM type: YTN; PAM sequence: TTG
aagtcagtgagaccaagaac

SEQ ID NO: 18688 - DNA, 20 bp, Artificial Sequence
  Description of Artificial Sequence: Synthetic oligonucleotide
  Target: ANGPTL4; (+) strand; PAM type: YTN; PAM sequence: TTC
cggatacagtgccactgcac

SEQ ID NO: 18689 - DNA, 20 bp, Artificial Sequence
  Description of Artificial Sequence: Synthetic oligonucleotide
  Target: ANGPTL4; (+) strand; PAM type: YTN; PAM sequence: CTG
cactccagcccaggcaacag

SEQ ID NO: 18690 - DNA, 20 bp, Artificial Sequence
  Description of Artificial Sequence: Synthetic oligonucleotide
  Target: ANGPTL4; (+) strand; PAM type: YTN; PAM sequence: CTC
cagcccaggcaacagagcga

SEQ ID NO: 18691 - DNA, 20 bp, Artificial Sequence
  Description of Artificial Sequence: Synthetic oligonucleotide
  Target: ANGPTL4; (+) strand; PAM type: YTN; PAM sequence: TTC
tgtctaaaaaataaataaat

SEQ ID NO: 18692 - DNA, 20 bp, Artificial Sequence
  Description of Artificial Sequence: Synthetic oligonucleotide
  Target: ANGPTL4; (+) strand; PAM type: YTN; PAM sequence: CTG
tctaaaaaataaataaataa

SEQ ID NO: 18693 - DNA, 20 bp, Artificial Sequence
  Description of Artificial Sequence: Synthetic oligonucleotide
  Target: ANGPTL4; (+) strand; PAM type: YTN; PAM sequence: CTA
aaaaataaataaataaatat

SEQ ID NO: 18694 - DNA, 20 bp, Artificial Sequence
  Description of Artificial Sequence: Synthetic oligonucleotide
  Target: ANGPTL4; (+) strand; PAM type: YTN; PAM sequence: TTG
taataattggataccctaca

SEQ ID NO: 18695 - DNA, 20 bp, Artificial Sequence
  Description of Artificial Sequence: Synthetic oligonucleotide
  Target: ANGPTL4; (+) strand; PAM type: YTN; PAM sequence: TTG
gataccctacatctaggaca

SEQ ID NO: 18696 - DNA, 20 bp, Artificial Sequence
  Description of Artificial Sequence: Synthetic oligonucleotide
  Target: ANGPTL4; (+) strand; PAM type: YTN; PAM sequence: CTA
catctaggacatgtatttga

SEQ ID NO: 18697 - DNA, 20 bp, Artificial Sequence
  Description of Artificial Sequence: Synthetic oligonucleotide
  Target: ANGPTL4; (+) strand; PAM type: YTN; PAM sequence: CTA
ggacatgtatttgaggaaaa

SEQ ID NO: 18698 - DNA, 20 bp, Artificial Sequence
  Description of Artificial Sequence: Synthetic oligonucleotide
  Target: ANGPTL4; (+) strand; PAM type: YTN; PAM sequence: TTT
gaggaaaaccacatctgtcc

SEQ ID NO: 18699 - DNA, 20 bp, Artificial Sequence
  Description of Artificial Sequence: Synthetic oligonucleotide
  Target: ANGPTL4; (+) strand; PAM type: YTN; PAM sequence: TTG
aggaaaaccacatctgtcca

SEQ ID NO: 18700 - DNA, 20 bp, Artificial Sequence
  Description of Artificial Sequence: Synthetic oligonucleotide
  Target: ANGPTL4; (+) strand; PAM type: YTN; PAM sequence: CTG
tccattttctgaaccccagc

SEQ ID NO: 18701 - DNA, 20 bp, Artificial Sequence
  Description of Artificial Sequence: Synthetic oligonucleotide
  Target: ANGPTL4; (+) strand; PAM type: YTN; PAM sequence: TTT
tctgaaccccagctgctgtt

SEQ ID NO: 18702 - DNA, 20 bp, Artificial Sequence
  Description of Artificial Sequence: Synthetic oligonucleotide
  Target: ANGPTL4; (+) strand; PAM type: YTN; PAM sequence: TTT
ctgaaccccagctgctgtta

SEQ ID NO: 18703 - DNA, 20 bp, Artificial Sequence
  Description of Artificial Sequence: Synthetic oligonucleotide
  Target: ANGPTL4; (+) strand; PAM type: YTN; PAM sequence: TTC
tgaaccccagctgctgttaa

SEQ ID NO: 18704 - DNA, 20 bp, Artificial Sequence
  Description of Artificial Sequence: Synthetic oligonucleotide
  Target: ANGPTL4; (+) strand; PAM type: YTN; PAM sequence: CTG
aaccccagctgctgttaatt

SEQ ID NO: 18705 - DNA, 20 bp, Artificial Sequence
  Description of Artificial Sequence: Synthetic oligonucleotide
  Target: ANGPTL4; (+) strand; PAM type: YTN; PAM sequence: CTG
ctgttaattttttttttttt

SEQ ID NO: 18706 - DNA, 20 bp, Artificial Sequence
  Description of Artificial Sequence: Synthetic oligonucleotide
  Target: ANGPTL4; (+) strand; PAM type: YTN; PAM sequence: CTG
ttaatttttttttttttttt

SEQ ID NO: 18707 - DNA, 20 bp, Artificial Sequence
  Description of Artificial Sequence: Synthetic oligonucleotide
  Target: ANGPTL4; (+) strand; PAM type: YTN; PAM sequence: TTA
attttttttttttttttttc

SEQ ID NO: 18708 - DNA, 20 bp, Artificial Sequence
  Description of Artificial Sequence: Synthetic oligonucleotide
  Target: ANGPTL4; (+) strand; PAM type: YTN; PAM sequence: TTT
tttttttttttttttccgag

SEQ ID NO: 18709 - DNA, 20 bp, Artificial Sequence
  Description of Artificial Sequence: Synthetic oligonucleotide
  Target: ANGPTL4; (+) strand; PAM type: YTN; PAM sequence: TTT
ttttttttttttttccgaga

SEQ ID NO: 18710 - DNA, 20 bp, Artificial Sequence
  Description of Artificial Sequence: Synthetic oligonucleotide
  Target: ANGPTL4; (+) strand; PAM type: YTN; PAM sequence: TTT
tttttttttttttccgagac

SEQ ID NO: 18711 - DNA, 20 bp, Artificial Sequence
  Description of Artificial Sequence: Synthetic oligonucleotide
  Target: ANGPTL4; (+) strand; PAM type: YTN; PAM sequence: TTT
ttttttttttttccgagaca

SEQ ID NO: 18712 - DNA, 20 bp, Artificial Sequence
  Description of Artificial Sequence: Synthetic oligonucleotide
  Target: ANGPTL4; (+) strand; PAM type: YTN; PAM sequence: TTT
tttttttttttccgagacaa

SEQ ID NO: 18713 - DNA, 20 bp, Artificial Sequence
  Description of Artificial Sequence: Synthetic oligonucleotide
  Target: ANGPTL4; (+) strand; PAM type: YTN; PAM sequence: TTT
ttttttttttccgagacaag

SEQ ID NO: 18714 - DNA, 20 bp, Artificial Sequence
  Description of Artificial Sequence: Synthetic oligonucleotide
  Target: ANGPTL4; (+) strand; PAM type: YTN; PAM sequence: TTT
tttttttttccgagacaaga

SEQ ID NO: 18715 - DNA, 20 bp, Artificial Sequence
  Description of Artificial Sequence: Synthetic oligonucleotide
  Target: ANGPTL4; (+) strand; PAM type: YTN; PAM sequence: TTT
ttttttttccgagacaagag

SEQ ID NO: 18716 - DNA, 20 bp, Artificial Sequence
  Description of Artificial Sequence: Synthetic oligonucleotide
  Target: ANGPTL4; (+) strand; PAM type: YTN; PAM sequence: TTT
tttttttccgagacaagagt

SEQ ID NO: 18717 - DNA, 20 bp, Artificial Sequence
  Description of Artificial Sequence: Synthetic oligonucleotide
  Target: ANGPTL4; (+) strand; PAM type: YTN; PAM sequence: TTT
ttttttccgagacaagagtc

SEQ ID NO: 18718 - DNA, 20 bp, Artificial Sequence
  Description of Artificial Sequence: Synthetic oligonucleotide
  Target: ANGPTL4; (+) strand; PAM type: YTN; PAM sequence: TTT
tttttccgagacaagagtct

SEQ ID NO: 18719 - DNA, 20 bp, Artificial Sequence
  Description of Artificial Sequence: Synthetic oligonucleotide
  Target: ANGPTL4; (+) strand; PAM type: YTN; PAM sequence: TTT
ttttccgagacaagagtctc

SEQ ID NO: 18720 - DNA, 20 bp, Artificial Sequence
  Description of Artificial Sequence: Synthetic oligonucleotide
  Target: ANGPTL4; (+) strand; PAM type: YTN; PAM sequence: TTT
tttccgagacaagagtctca

SEQ ID NO: 18721 - DNA, 20 bp, Artificial Sequence
  Description of Artificial Sequence: Synthetic oligonucleotide
  Target: ANGPTL4; (+) strand; PAM type: YTN; PAM sequence: TTT
ttccgagacaagagtctcac

SEQ ID NO: 18722 - DNA, 20 bp, Artificial Sequence
  Description of Artificial Sequence: Synthetic oligonucleotide
  Target: ANGPTL4; (+) strand; PAM type: YTN; PAM sequence: TTT
tccgagacaagagtctcact

SEQ ID NO: 18723 - DNA, 20 bp, Artificial Sequence
  Description of Artificial Sequence: Synthetic oligonucleotide
  Target: ANGPTL4; (+) strand; PAM type: YTN; PAM sequence: TTT
ccgagacaagagtctcactc

SEQ ID NO: 18724 - DNA, 20 bp, Artificial Sequence
  Description of Artificial Sequence: Synthetic oligonucleotide
  Target: ANGPTL4; (+) strand; PAM type: YTN; PAM sequence: TTC
cgagacaagagtctcactct

SEQ ID NO: 18725 - DNA, 20 bp, Artificial Sequence
  Description of Artificial Sequence: Synthetic oligonucleotide
  Target: ANGPTL4; (+) strand; PAM type: YTN; PAM sequence: CTC
actctgtcacccaggctgga

SEQ ID NO: 18726 - DNA, 20 bp, Artificial Sequence
  Description of Artificial Sequence: Synthetic oligonucleotide
  Target: ANGPTL4; (+) strand; PAM type: YTN; PAM sequence: CTC
tgtcacccaggctggagcgc

SEQ ID NO: 18727 - DNA, 20 bp, Artificial Sequence
  Description of Artificial Sequence: Synthetic oligonucleotide
  Target: ANGPTL4; (+) strand; PAM type: YTN; PAM sequence: CTG
tcacccaggctggagcgcgg

SEQ ID NO: 18728 - DNA, 20 bp, Artificial Sequence
  Description of Artificial Sequence: Synthetic oligonucleotide
  Target: ANGPTL4; (+) strand; PAM type: YTN; PAM sequence: CTG
gagcgcggtagtgcgatctc

SEQ ID NO: 18729 - DNA, 20 bp, Artificial Sequence
  Description of Artificial Sequence: Synthetic oligonucleotide
  Target: ANGPTL4; (+) strand; PAM type: YTN; PAM sequence: CTC
agcttactgcaacctccacc

SEQ ID NO: 18730 - DNA, 20 bp, Artificial Sequence
  Description of Artificial Sequence: Synthetic oligonucleotide
  Target: ANGPTL4; (+) strand; PAM type: YTN; PAM sequence: CTT
actgcaacctccacctcccg

SEQ ID NO: 18731 - DNA, 20 bp, Artificial Sequence
  Description of Artificial Sequence: Synthetic oligonucleotide
  Target: ANGPTL4; (+) strand; PAM type: YTN; PAM sequence: TTA
ctgcaacctccacctcccgg

SEQ ID NO: 18732 - DNA, 20 bp, Artificial Sequence
  Description of Artificial Sequence: Synthetic oligonucleotide
  Target: ANGPTL4; (+) strand; PAM type: YTN; PAM sequence: CTG
caacctccacctcccgggtt

SEQ ID NO: 18733 - DNA, 20 bp, Artificial Sequence
  Description of Artificial Sequence: Synthetic oligonucleotide
  Target: ANGPTL4; (+) strand; PAM type: YTN; PAM sequence: CTC
cacctcccgggttcaagcga

SEQ ID NO: 18734 - DNA, 20 bp, Artificial Sequence
  Description of Artificial Sequence: Synthetic oligonucleotide
  Target: ANGPTL4; (+) strand; PAM type: YTN; PAM sequence: CTC
ccgggttcaagcgattctcc

SEQ ID NO: 18735 - DNA, 20 bp, Artificial Sequence
  Description of Artificial Sequence: Synthetic oligonucleotide
  Target: ANGPTL4; (+) strand; PAM type: YTN; PAM sequence: TTC
aagcgattctcctgcctcgg

SEQ ID NO: 18736 - DNA, 20 bp, Artificial Sequence
  Description of Artificial Sequence: Synthetic oligonucleotide
  Target: ANGPTL4; (+) strand; PAM type: YTN; PAM sequence: TTC
tcctgcctcggcctcccgag

SEQ ID NO: 18737 - DNA, 20 bp, Artificial Sequence
  Description of Artificial Sequence: Synthetic oligonucleotide
  Target: ANGPTL4; (+) strand; PAM type: YTN; PAM sequence: CTC
ctgcctcggcctcccgagta

SEQ ID NO: 18738 - DNA, 20 bp, Artificial Sequence
  Description of Artificial Sequence: Synthetic oligonucleotide
  Target: ANGPTL4; (+) strand; PAM type: YTN; PAM sequence: CTG
cctcggcctcccgagtagct

SEQ ID NO: 18739 - DNA, 20 bp, Artificial Sequence
  Description of Artificial Sequence: Synthetic oligonucleotide
  Target: ANGPTL4; (+) strand; PAM type: YTN; PAM sequence: CTC
ggcctcccgagtagctgaga

SEQ ID NO: 18740 - DNA, 20 bp, Artificial Sequence
  Description of Artificial Sequence: Synthetic oligonucleotide
  Target: ANGPTL4; (+) strand; PAM type: YTN; PAM sequence: CTC
ccgagtagctgagattacag

SEQ ID NO: 18741 - DNA, 20 bp, Artificial Sequence
  Description of Artificial Sequence: Synthetic oligonucleotide
  Target: ANGPTL4; (+) strand; PAM type: YTN; PAM sequence: CTG
agattacaggcgcctcccac

SEQ ID NO: 18742 - DNA, 20 bp, Artificial Sequence
  Description of Artificial Sequence: Synthetic oligonucleotide
  Target: ANGPTL4; (+) strand; PAM type: YTN; PAM sequence: TTA
caggcgcctcccactgcacc

SEQ ID NO: 18743 - DNA, 20 bp, Artificial Sequence
  Description of Artificial Sequence: Synthetic oligonucleotide
  Target: ANGPTL4; (+) strand; PAM type: YTN; PAM sequence: CTC
ccactgcacccagctaattt

SEQ ID NO: 18744 - DNA, 20 bp, Artificial Sequence
  Description of Artificial Sequence: Synthetic oligonucleotide
  Target: ANGPTL4; (+) strand; PAM type: YTN; PAM sequence: CTG
cacccagctaatttttgtat

SEQ ID NO: 18745 - DNA, 20 bp, Artificial Sequence
  Description of Artificial Sequence: Synthetic oligonucleotide
  Target: ANGPTL4; (+) strand; PAM type: YTN; PAM sequence: CTA
atttttgtatttttagtata

SEQ ID NO: 18746 - DNA, 20 bp, Artificial Sequence
  Description of Artificial Sequence: Synthetic oligonucleotide
  Target: ANGPTL4; (+) strand; PAM type: YTN; PAM sequence: TTT
ttgtatttttagtatagatg

SEQ ID NO: 18747 - DNA, 20 bp, Artificial Sequence
  Description of Artificial Sequence: Synthetic oligonucleotide
  Target: ANGPTL4; (+) strand; PAM type: YTN; PAM sequence: TTT
tgtatttttagtatagatgg

SEQ ID NO: 18748 - DNA, 20 bp, Artificial Sequence
  Description of Artificial Sequence: Synthetic oligonucleotide
  Target: ANGPTL4; (+) strand; PAM type: YTN; PAM sequence: TTT
gtatttttagtatagatggg

SEQ ID NO: 18749 - DNA, 20 bp, Artificial Sequence
  Description of Artificial Sequence: Synthetic oligonucleotide
  Target: ANGPTL4; (+) strand; PAM type: YTN; PAM sequence: TTG
tatttttagtatagatgggt

SEQ ID NO: 18750 - DNA, 20 bp, Artificial Sequence
  Description of Artificial Sequence: Synthetic oligonucleotide
  Target: ANGPTL4; (+) strand; PAM type: YTN; PAM sequence: TTT
ttagtatagatgggtttggc

SEQ ID NO: 18751 - DNA, 20 bp, Artificial Sequence
  Description of Artificial Sequence: Synthetic oligonucleotide
  Target: ANGPTL4; (+) strand; PAM type: YTN; PAM sequence: TTT
tagtatagatgggtttggcc

SEQ ID NO: 18752 - DNA, 20 bp, Artificial Sequence
  Description of Artificial Sequence: Synthetic oligonucleotide
  Target: ANGPTL4; (+) strand; PAM type: YTN; PAM sequence: TTT
agtatagatgggtttggcca

SEQ ID NO: 18753 - DNA, 20 bp, Artificial Sequence
  Description of Artificial Sequence: Synthetic oligonucleotide
  Target: ANGPTL4; (+) strand; PAM type: YTN; PAM sequence: TTA
gtatagatgggtttggccag

SEQ ID NO: 18754 - DNA, 20 bp, Artificial Sequence
  Description of Artificial Sequence: Synthetic oligonucleotide
  Target: ANGPTL4; (+) strand; PAM type: YTN; PAM sequence: TTT
ggccaggctggtctcaaact

SEQ ID NO: 18755 - DNA, 20 bp, Artificial Sequence
  Description of Artificial Sequence: Synthetic oligonucleotide
  Target: ANGPTL4; (+) strand; PAM type: YTN; PAM sequence: TTG
gccaggctggtctcaaactc

SEQ ID NO: 18756 - DNA, 20 bp, Artificial Sequence
  Description of Artificial Sequence: Synthetic oligonucleotide
  Target: ANGPTL4; (+) strand; PAM type: YTN; PAM sequence: CTG
gtctcaaactcctgacctca

SEQ ID NO: 18757 - DNA, 20 bp, Artificial Sequence
  Description of Artificial Sequence: Synthetic oligonucleotide
  Target: ANGPTL4; (+) strand; PAM type: YTN; PAM sequence: CTC
aaactcctgacctcaagtga

SEQ ID NO: 18758 - DNA, 20 bp, Artificial Sequence
  Description of Artificial Sequence: Synthetic oligonucleotide
  Target: ANGPTL4; (+) strand; PAM type: YTN; PAM sequence: CTC
ctgacctcaagtgatctgcc

SEQ ID NO: 18759 - DNA, 20 bp, Artificial Sequence
  Description of Artificial Sequence: Synthetic oligonucleotide
  Target: ANGPTL4; (+) strand; PAM type: YTN; PAM sequence: CTG
acctcaagtgatctgcccgc

SEQ ID NO: 18760 - DNA, 20 bp, Artificial Sequence
  Description of Artificial Sequence: Synthetic oligonucleotide
  Target: ANGPTL4; (+) strand; PAM type: YTN; PAM sequence: CTC
aagtgatctgcccgcctcgg

SEQ ID NO: 18761 - DNA, 20 bp, Artificial Sequence
  Description of Artificial Sequence: Synthetic oligonucleotide
  Target: ANGPTL4; (+) strand; PAM type: YTN; PAM sequence: CTG
cccgcctcggcctccgaaac

SEQ ID NO: 18762 - DNA, 20 bp, Artificial Sequence
  Description of Artificial Sequence: Synthetic oligonucleotide
  Target: ANGPTL4; (+) strand; PAM type: YTN; PAM sequence: CTC
ggcctccgaaactggtggga

SEQ ID NO: 18763 - DNA, 20 bp, Artificial Sequence
  Description of Artificial Sequence: Synthetic oligonucleotide
  Target: ANGPTL4; (+) strand; PAM type: YTN; PAM sequence: CTC
cgaaactggtgggattacag

SEQ ID NO: 18764 - DNA, 20 bp, Artificial Sequence
  Description of Artificial Sequence: Synthetic oligonucleotide
  Target: ANGPTL4; (+) strand; PAM type: YTN; PAM sequence: CTG
gtgggattacaggcgcaagc

SEQ ID NO: 18765 - DNA, 20 bp, Artificial Sequence
  Description of Artificial Sequence: Synthetic oligonucleotide
  Target: ANGPTL4; (+) strand; PAM type: YTN; PAM sequence: TTA
caggcgcaagccactgtgcc

SEQ ID NO: 18766 - DNA, 20 bp, Artificial Sequence
  Description of Artificial Sequence: Synthetic oligonucleotide
  Target: ANGPTL4; (+) strand; PAM type: YTN; PAM sequence: CTG
tgcccggcctgttaatttat

SEQ ID NO: 18767 - DNA, 20 bp, Artificial Sequence
  Description of Artificial Sequence: Synthetic oligonucleotide
  Target: ANGPTL4; (+) strand; PAM type: YTN; PAM sequence: CTG
ttaatttatttttgccccag

SEQ ID NO: 18768 - DNA, 20 bp, Artificial Sequence
  Description of Artificial Sequence: Synthetic oligonucleotide
  Target: ANGPTL4; (+) strand; PAM type: YTN; PAM sequence: TTA
atttatttttgccccagtat

SEQ ID NO: 18769 - DNA, 20 bp, Artificial Sequence
  Description of Artificial Sequence: Synthetic oligonucleotide
  Target: ANGPTL4; (+) strand; PAM type: YTN; PAM sequence: TTT
atttttgccccagtatctcc

SEQ ID NO: 18770 - DNA, 20 bp, Artificial Sequence
  Description of Artificial Sequence: Synthetic oligonucleotide
  Target: ANGPTL4; (+) strand; PAM type: YTN; PAM sequence: TTA
tttttgccccagtatctccc

SEQ ID NO: 18771 - DNA, 20 bp, Artificial Sequence
  Description of Artificial Sequence: Synthetic oligonucleotide
  Target: ANGPTL4; (+) strand; PAM type: YTN; PAM sequence: TTT
ttgccccagtatctccctcc

SEQ ID NO: 18772 - DNA, 20 bp, Artificial Sequence
  Description of Artificial Sequence: Synthetic oligonucleotide
  Target: ANGPTL4; (+) strand; PAM type: YTN; PAM sequence: TTT
tgccccagtatctccctcca

SEQ ID NO: 18773 - DNA, 20 bp, Artificial Sequence
  Description of Artificial Sequence: Synthetic oligonucleotide
  Target: ANGPTL4; (+) strand; PAM type: YTN; PAM sequence: TTT
gccccagtatctccctccaa

SEQ ID NO: 18774 - DNA, 20 bp, Artificial Sequence
  Description of Artificial Sequence: Synthetic oligonucleotide
  Target: ANGPTL4; (+) strand; PAM type: YTN; PAM sequence: TTG
ccccagtatctccctccaaa

SEQ ID NO: 18775 - DNA, 20 bp, Artificial Sequence
  Description of Artificial Sequence: Synthetic oligonucleotide
  Target: ANGPTL4; (+) strand; PAM type: YTN; PAM sequence: CTC
cctccaaatattccttatag

SEQ ID NO: 18776 - DNA, 20 bp, Artificial Sequence
  Description of Artificial Sequence: Synthetic oligonucleotide
  Target: ANGPTL4; (+) strand; PAM type: YTN; PAM sequence: CTC
caaatattccttatagatgt

SEQ ID NO: 18777 - DNA, 20 bp, Artificial Sequence
  Description of Artificial Sequence: Synthetic oligonucleotide
  Target: ANGPTL4; (+) strand; PAM type: YTN; PAM sequence: TTC
cttatagatgtctcttgggg

SEQ ID NO: 18778 - DNA, 20 bp, Artificial Sequence
  Description of Artificial Sequence: Synthetic oligonucleotide
  Target: ANGPTL4; (+) strand; PAM type: YTN; PAM sequence: CTT
atagatgtctcttggggagg

SEQ ID NO: 18779 - DNA, 20 bp, Artificial Sequence
  Description of Artificial Sequence: Synthetic oligonucleotide
  Target: ANGPTL4; (+) strand; PAM type: YTN; PAM sequence: TTA
tagatgtctcttggggaggt

SEQ ID NO: 18780 - DNA, 20 bp, Artificial Sequence
  Description of Artificial Sequence: Synthetic oligonucleotide
  Target: ANGPTL4; (+) strand; PAM type: YTN; PAM sequence: CTC
ttggggaggtggtgggggtt

SEQ ID NO: 18781 - DNA, 20 bp, Artificial Sequence
  Description of Artificial Sequence: Synthetic oligonucleotide
  Target: ANGPTL4; (+) strand; PAM type: YTN; PAM sequence: CTT
ggggaggtggtgggggttct

SEQ ID NO: 18782 - DNA, 20 bp, Artificial Sequence
  Description of Artificial Sequence: Synthetic oligonucleotide
  Target: ANGPTL4; (+) strand; PAM type: YTN; PAM sequence: TTG
gggaggtggtgggggttctt

SEQ ID NO: 18783 - DNA, 20 bp, Artificial Sequence
  Description of Artificial Sequence: Synthetic oligonucleotide
  Target: ANGPTL4; (+) strand; PAM type: YTN; PAM sequence: TTC
ttgcgctagaagaaaaaata

SEQ ID NO: 18784 - DNA, 20 bp, Artificial Sequence
  Description of Artificial Sequence: Synthetic oligonucleotide
  Target: ANGPTL4; (+) strand; PAM type: YTN; PAM sequence: CTT
gcgctagaagaaaaaatatc

SEQ ID NO: 18785 - DNA, 20 bp, Artificial Sequence
  Description of Artificial Sequence: Synthetic oligonucleotide
  Target: ANGPTL4; (+) strand; PAM type: YTN; PAM sequence: TTG
cgctagaagaaaaaatatct

SEQ ID NO: 18786 - DNA, 20 bp, Artificial Sequence
  Description of Artificial Sequence: Synthetic oligonucleotide
  Target: ANGPTL4; (+) strand; PAM type: YTN; PAM sequence: CTA
gaagaaaaaatatctgtgat

SEQ ID NO: 18787 - DNA, 20 bp, Artificial Sequence
  Description of Artificial Sequence: Synthetic oligonucleotide
  Target: ANGPTL4; (+) strand; PAM type: YTN; PAM sequence: CTG
tgatttccttgtcttgaccc

SEQ ID NO: 18788 - DNA, 20 bp, Artificial Sequence
  Description of Artificial Sequence: Synthetic oligonucleotide
  Target: ANGPTL4; (+) strand; PAM type: YTN; PAM sequence: TTT
ccttgtcttgacccttcctg

SEQ ID NO: 18789 - DNA, 20 bp, Artificial Sequence
  Description of Artificial Sequence: Synthetic oligonucleotide
  Target: ANGPTL4; (+) strand; PAM type: YTN; PAM sequence: TTC
cttgtcttgacccttcctgg

SEQ ID NO: 18790 - DNA, 20 bp, Artificial Sequence
  Description of Artificial Sequence: Synthetic oligonucleotide
  Target: ANGPTL4; (+) strand; PAM type: YTN; PAM sequence: CTT
gtcttgacccttcctggcag

SEQ ID NO: 18791 - DNA, 20 bp, Artificial Sequence
  Description of Artificial Sequence: Synthetic oligonucleotide
  Target: ANGPTL4; (+) strand; PAM type: YTN; PAM sequence: TTG
tcttgacccttcctggcagg

SEQ ID NO: 18792 - DNA, 20 bp, Artificial Sequence
  Description of Artificial Sequence: Synthetic oligonucleotide
  Target: ANGPTL4; (+) strand; PAM type: YTN; PAM sequence: CTT
gacccttcctggcaggtgct

SEQ ID NO: 18793 - DNA, 20 bp, Artificial Sequence
  Description of Artificial Sequence: Synthetic oligonucleotide
  Target: ANGPTL4; (+) strand; PAM type: YTN; PAM sequence: TTG
acccttcctggcaggtgctg

SEQ ID NO: 18794 - DNA, 20 bp, Artificial Sequence
  Description of Artificial Sequence: Synthetic oligonucleotide
  Target: ANGPTL4; (+) strand; PAM type: YTN; PAM sequence: CTT
cctggcaggtgctggggaca

SEQ ID NO: 18795 - DNA, 20 bp, Artificial Sequence
  Description of Artificial Sequence: Synthetic oligonucleotide
  Target: ANGPTL4; (+) strand; PAM type: YTN; PAM sequence: TTC
ctggcaggtgctggggacac

SEQ ID NO: 18796 - DNA, 20 bp, Artificial Sequence
  Description of Artificial Sequence: Synthetic oligonucleotide
  Target: ANGPTL4; (+) strand; PAM type: YTN; PAM sequence: CTG
gcaggtgctggggacacagc

SEQ ID NO: 18797 - DNA, 20 bp, Artificial Sequence
  Description of Artificial Sequence: Synthetic oligonucleotide
  Target: ANGPTL4; (+) strand; PAM type: YTN; PAM sequence: CTG
gggacacagctgtttccctg

SEQ ID NO: 18798 - DNA, 20 bp, Artificial Sequence
  Description of Artificial Sequence: Synthetic oligonucleotide
  Target: ANGPTL4; (+) strand; PAM type: YTN; PAM sequence: CTG
tttccctggggctgtggctg

SEQ ID NO: 18799 - DNA, 20 bp, Artificial Sequence
  Description of Artificial Sequence: Synthetic oligonucleotide
  Target: ANGPTL4; (+) strand; PAM type: YTN; PAM sequence: TTT
ccctggggctgtggctgggt

SEQ ID NO: 18800 - DNA, 20 bp, Artificial Sequence
  Description of Artificial Sequence: Synthetic oligonucleotide
  Target: ANGPTL4; (+) strand; PAM type: YTN; PAM sequence: TTC
cctggggctgtggctgggta

SEQ ID NO: 18801 - DNA, 20 bp, Artificial Sequence
  Description of Artificial Sequence: Synthetic oligonucleotide
  Target: ANGPTL4; (+) strand; PAM type: YTN; PAM sequence: CTG
gggctgtggctgggtatagg

SEQ ID NO: 18802 - DNA, 20 bp, Artificial Sequence
  Description of Artificial Sequence: Synthetic oligonucleotide
  Target: ANGPTL4; (+) strand; PAM type: YTN; PAM sequence: CTG
tggctgggtataggtgacaa

SEQ ID NO: 18803 - DNA, 20 bp, Artificial Sequence
  Description of Artificial Sequence: Synthetic oligonucleotide
  Target: ANGPTL4; (+) strand; PAM type: YTN; PAM sequence: CTG
ggtataggtgacaaactttt

SEQ ID NO: 18804 - DNA, 20 bp, Artificial Sequence
  Description of Artificial Sequence: Synthetic oligonucleotide
  Target: ANGPTL4; (+) strand; PAM type: YTN; PAM sequence: CTT
tttagctttgtagaggtagg

SEQ ID NO: 18805 - DNA, 20 bp, Artificial Sequence
  Description of Artificial Sequence: Synthetic oligonucleotide
  Target: ANGPTL4; (+) strand; PAM type: YTN; PAM sequence: TTT
ttagctttgtagaggtaggt

SEQ ID NO: 18806 - DNA, 20 bp, Artificial Sequence
  Description of Artificial Sequence: Synthetic oligonucleotide
  Target: ANGPTL4; (+) strand; PAM type: YTN; PAM sequence: TTT
tagctttgtagaggtaggtc

SEQ ID NO: 18807 - DNA, 20 bp, Artificial Sequence
  Description of Artificial Sequence: Synthetic oligonucleotide
  Target: ANGPTL4; (+) strand; PAM type: YTN; PAM sequence: TTT
agctttgtagaggtaggtcc

SEQ ID NO: 18808 - DNA, 20 bp, Artificial Sequence
  Description of Artificial Sequence: Synthetic oligonucleotide
  Target: ANGPTL4; (+) strand; PAM type: YTN; PAM sequence: TTA
gctttgtagaggtaggtcct

SEQ ID NO: 18809 - DNA, 20 bp, Artificial Sequence
  Description of Artificial Sequence: Synthetic oligonucleotide
  Target: ANGPTL4; (+) strand; PAM type: YTN; PAM sequence: CTT
tgtagaggtaggtcctacag

SEQ ID NO: 18810 - DNA, 20 bp, Artificial Sequence
  Description of Artificial Sequence: Synthetic oligonucleotide
  Target: ANGPTL4; (+) strand; PAM type: YTN; PAM sequence: TTT
gtagaggtaggtcctacagc

SEQ ID NO: 18811 - DNA, 20 bp, Artificial Sequence
  Description of Artificial Sequence: Synthetic oligonucleotide
  Target: ANGPTL4; (+) strand; PAM type: YTN; PAM sequence: TTG
tagaggtaggtcctacagct

SEQ ID NO: 18812 - DNA, 20 bp, Artificial Sequence
  Description of Artificial Sequence: Synthetic oligonucleotide
  Target: ANGPTL4; (+) strand; PAM type: YTN; PAM sequence: CTA
cagctgccaggccagggagg

SEQ ID NO: 18813 - DNA, 20 bp, Artificial Sequence
  Description of Artificial Sequence: Synthetic oligonucleotide
  Target: ANGPTL4; (+) strand; PAM type: YTN; PAM sequence: CTG
ccaggccagggaggctagag

SEQ ID NO: 18814 - DNA, 20 bp, Artificial Sequence
  Description of Artificial Sequence: Synthetic oligonucleotide
  Target: ANGPTL4; (+) strand; PAM type: YTN; PAM sequence: CTA
gaggctgccctctccaggtt

SEQ ID NO: 18815 - DNA, 20 bp, Artificial Sequence
  Description of Artificial Sequence: Synthetic oligonucleotide
  Target: ANGPTL4; (+) strand; PAM type: YTN; PAM sequence: CTG
ccctctccaggttccttgtt

SEQ ID NO: 18816 - DNA, 20 bp, Artificial Sequence
  Description of Artificial Sequence: Synthetic oligonucleotide
  Target: ANGPTL4; (+) strand; PAM type: YTN; PAM sequence: CTC
tccaggttccttgtttgcct

SEQ ID NO: 18817 - DNA, 20 bp, Artificial Sequence
  Description of Artificial Sequence: Synthetic oligonucleotide
  Target: ANGPTL4; (+) strand; PAM type: YTN; PAM sequence: CTC
caggttccttgtttgcctgt

SEQ ID NO: 18818 - DNA, 20 bp, Artificial Sequence
  Description of Artificial Sequence: Synthetic oligonucleotide
  Target: ANGPTL4; (+) strand; PAM type: YTN; PAM sequence: TTC
cttgtttgcctgtgtcctgt

SEQ ID NO: 18819 - DNA, 20 bp, Artificial Sequence
  Description of Artificial Sequence: Synthetic oligonucleotide
  Target: ANGPTL4; (+) strand; PAM type: YTN; PAM sequence: CTT
gtttgcctgtgtcctgtact

SEQ ID NO: 18820 - DNA, 20 bp, Artificial Sequence
  Description of Artificial Sequence: Synthetic oligonucleotide
  Target: ANGPTL4; (+) strand; PAM type: YTN; PAM sequence: TTG
tttgcctgtgtcctgtactg

SEQ ID NO: 18821 - DNA, 20 bp, Artificial Sequence
  Description of Artificial Sequence: Synthetic oligonucleotide
  Target: ANGPTL4; (+) strand; PAM type: YTN; PAM sequence: TTT
gcctgtgtcctgtactgagc

SEQ ID NO: 18822 - DNA, 20 bp, Artificial Sequence
  Description of Artificial Sequence: Synthetic oligonucleotide
  Target: ANGPTL4; (+) strand; PAM type: YTN; PAM sequence: TTG
cctgtgtcctgtactgagca

SEQ ID NO: 18823 - DNA, 20 bp, Artificial Sequence
  Description of Artificial Sequence: Synthetic oligonucleotide
  Target: ANGPTL4; (+) strand; PAM type: YTN; PAM sequence: CTG
tgtcctgtactgagcaggct

SEQ ID NO: 18824 - DNA, 20 bp, Artificial Sequence
  Description of Artificial Sequence: Synthetic oligonucleotide
  Target: ANGPTL4; (+) strand; PAM type: YTN; PAM sequence: CTG
tactgagcaggcttagagga

SEQ ID NO: 18825 - DNA, 20 bp, Artificial Sequence
  Description of Artificial Sequence: Synthetic oligonucleotide
  Target: ANGPTL4; (+) strand; PAM type: YTN; PAM sequence: CTG
agcaggcttagaggatctcc

SEQ ID NO: 18826 - DNA, 20 bp, Artificial Sequence
  Description of Artificial Sequence: Synthetic oligonucleotide
  Target: ANGPTL4; (+) strand; PAM type: YTN; PAM sequence: CTT
agaggatctcctctgagccc

SEQ ID NO: 18827 - DNA, 20 bp, Artificial Sequence
  Description of Artificial Sequence: Synthetic oligonucleotide
  Target: ANGPTL4; (+) strand; PAM type: YTN; PAM sequence: TTA
gaggatctcctctgagccca

SEQ ID NO: 18828 - DNA, 20 bp, Artificial Sequence
  Description of Artificial Sequence: Synthetic oligonucleotide
  Target: ANGPTL4; (+) strand; PAM type: YTN; PAM sequence: CTC
ctctgagcccactgtcactg

SEQ ID NO: 18829 - DNA, 20 bp, Artificial Sequence
  Description of Artificial Sequence: Synthetic oligonucleotide
  Target: ANGPTL4; (+) strand; PAM type: YTN; PAM sequence: CTC
tgagcccactgtcactggag

SEQ ID NO: 18830 - DNA, 20 bp, Artificial Sequence
  Description of Artificial Sequence: Synthetic oligonucleotide
  Target: ANGPTL4; (+) strand; PAM type: YTN; PAM sequence: CTG
agcccactgtcactggagct

SEQ ID NO: 18831 - DNA, 20 bp, Artificial Sequence
  Description of Artificial Sequence: Synthetic oligonucleotide
  Target: ANGPTL4; (+) strand; PAM type: YTN; PAM sequence: CTG
tcactggagctggtggtgag

SEQ ID NO: 18832 - DNA, 20 bp, Artificial Sequence
  Description of Artificial Sequence: Synthetic oligonucleotide
  Target: ANGPTL4; (+) strand; PAM type: YTN; PAM sequence: CTG
gagctggtggtgagtccagt

SEQ ID NO: 18833 - DNA, 20 bp, Artificial Sequence
  Description of Artificial Sequence: Synthetic oligonucleotide
  Target: ANGPTL4; (+) strand; PAM type: YTN; PAM sequence: CTG
gtggtgagtccagtctgcag

SEQ ID NO: 18834 - DNA, 20 bp, Artificial Sequence
  Description of Artificial Sequence: Synthetic oligonucleotide
  Target: ANGPTL4; (+) strand; PAM type: YTN; PAM sequence: CTG
caggagagggggttcctcta

SEQ ID NO: 18835 - DNA, 20 bp, Artificial Sequence
  Description of Artificial Sequence: Synthetic oligonucleotide
  Target: ANGPTL4; (+) strand; PAM type: YTN; PAM sequence: TTC
ctctagccacaccctcttca

SEQ ID NO: 18836 - DNA, 20 bp, Artificial Sequence
  Description of Artificial Sequence: Synthetic oligonucleotide
  Target: ANGPTL4; (+) strand; PAM type: YTN; PAM sequence: CTC
tagccacaccctcttcattt

SEQ ID NO: 18837 - DNA, 20 bp, Artificial Sequence
  Description of Artificial Sequence: Synthetic oligonucleotide
  Target: ANGPTL4; (+) strand; PAM type: YTN; PAM sequence: CTA
gccacaccctcttcatttcc

SEQ ID NO: 18838 - DNA, 20 bp, Artificial Sequence
  Description of Artificial Sequence: Synthetic oligonucleotide
  Target: ANGPTL4; (+) strand; PAM type: YTN; PAM sequence: CTC
ttcatttccaggctctgcca

SEQ ID NO: 18839 - DNA, 20 bp, Artificial Sequence
  Description of Artificial Sequence: Synthetic oligonucleotide
  Target: ANGPTL4; (+) strand; PAM type: YTN; PAM sequence: CTT
catttccaggctctgccaat

SEQ ID NO: 18840 - DNA, 20 bp, Artificial Sequence
  Description of Artificial Sequence: Synthetic oligonucleotide
  Target: ANGPTL4; (+) strand; PAM type: YTN; PAM sequence: TTC
atttccaggctctgccaatg

SEQ ID NO: 18841 - DNA, 20 bp, Artificial Sequence
  Description of Artificial Sequence: Synthetic oligonucleotide
  Target: ANGPTL4; (+) strand; PAM type: YTN; PAM sequence: TTT
ccaggctctgccaatgatgg

SEQ ID NO: 18842 - DNA, 20 bp, Artificial Sequence
  Description of Artificial Sequence: Synthetic oligonucleotide
  Target: ANGPTL4; (+) strand; PAM type: YTN; PAM sequence: TTC
caggctctgccaatgatggg

SEQ ID NO: 18843 - DNA, 20 bp, Artificial Sequence
  Description of Artificial Sequence: Synthetic oligonucleotide
  Target: ANGPTL4; (+) strand; PAM type: YTN; PAM sequence: CTC
tgccaatgatgggctcatct

SEQ ID NO: 18844 - DNA, 20 bp, Artificial Sequence
  Description of Artificial Sequence: Synthetic oligonucleotide
  Target: ANGPTL4; (+) strand; PAM type: YTN; PAM sequence: CTG
ccaatgatgggctcatctct

SEQ ID NO: 18845 - DNA, 20 bp, Artificial Sequence
  Description of Artificial Sequence: Synthetic oligonucleotide
  Target: ANGPTL4; (+) strand; PAM type: YTN; PAM sequence: CTC
atctcttcaatgtcatcctt

SEQ ID NO: 18846 - DNA, 20 bp, Artificial Sequence
  Description of Artificial Sequence: Synthetic oligonucleotide
  Target: ANGPTL4; (+) strand; PAM type: YTN; PAM sequence: CTC
ttcaatgtcatcctttttcc

SEQ ID NO: 18847 - DNA, 20 bp, Artificial Sequence
  Description of Artificial Sequence: Synthetic oligonucleotide
  Target: ANGPTL4; (+) strand; PAM type: YTN; PAM sequence: CTT
caatgtcatcctttttcctg

SEQ ID NO: 18848 - DNA, 20 bp, Artificial Sequence
  Description of Artificial Sequence: Synthetic oligonucleotide
  Target: ANGPTL4; (+) strand; PAM type: YTN; PAM sequence: TTC
aatgtcatcctttttcctgc

SEQ ID NO: 18849 - DNA, 20 bp, Artificial Sequence
  Description of Artificial Sequence: Synthetic oligonucleotide
  Target: ANGPTL4; (+) strand; PAM type: YTN; PAM sequence: CTT
tttcctgcagccaccttgac

SEQ ID NO: 18850 - DNA, 20 bp, Artificial Sequence
  Description of Artificial Sequence: Synthetic oligonucleotide
  Target: ANGPTL4; (+) strand; PAM type: YTN; PAM sequence: TTT
ttcctgcagccaccttgacc

SEQ ID NO: 18851 - DNA, 20 bp, Artificial Sequence
  Description of Artificial Sequence: Synthetic oligonucleotide
  Target: ANGPTL4; (+) strand; PAM type: YTN; PAM sequence: TTT
tcctgcagccaccttgacct

SEQ ID NO: 18852 - DNA, 20 bp, Artificial Sequence
  Description of Artificial Sequence: Synthetic oligonucleotide
  Target: ANGPTL4; (+) strand; PAM type: YTN; PAM sequence: TTT
cctgcagccaccttgacctc

SEQ ID NO: 18853 - DNA, 20 bp, Artificial Sequence
  Description of Artificial Sequence: Synthetic oligonucleotide
  Target: ANGPTL4; (+) strand; PAM type: YTN; PAM sequence: TTC
ctgcagccaccttgacctca

SEQ ID NO: 18854 - DNA, 20 bp, Artificial Sequence
  Description of Artificial Sequence: Synthetic oligonucleotide
  Target: ANGPTL4; (+) strand; PAM type: YTN; PAM sequence: CTG
cagccaccttgacctcaaag

SEQ ID NO: 18855 - DNA, 20 bp, Artificial Sequence
  Description of Artificial Sequence: Synthetic oligonucleotide
  Target: ANGPTL4; (+) strand; PAM type: YTN; PAM sequence: CTT
gacctcaaagcatttcctgc

SEQ ID NO: 18856 - DNA, 20 bp, Artificial Sequence
  Description of Artificial Sequence: Synthetic oligonucleotide
  Target: ANGPTL4; (+) strand; PAM type: YTN; PAM sequence: TTG
acctcaaagcatttcctgcc

SEQ ID NO: 18857 - DNA, 20 bp, Artificial Sequence
  Description of Artificial Sequence: Synthetic oligonucleotide
  Target: ANGPTL4; (+) strand; PAM type: YTN; PAM sequence: CTC
aaagcatttcctgcccctcc

SEQ ID NO: 18858 - DNA, 20 bp, Artificial Sequence
  Description of Artificial Sequence: Synthetic oligonucleotide
  Target: ANGPTL4; (+) strand; PAM type: YTN; PAM sequence: TTT
cctgcccctccaacctgggg

SEQ ID NO: 18859 - DNA, 20 bp, Artificial Sequence
  Description of Artificial Sequence: Synthetic oligonucleotide
  Target: ANGPTL4; (+) strand; PAM type: YTN; PAM sequence: TTC
ctgcccctccaacctgggga

SEQ ID NO: 18860 - DNA, 20 bp, Artificial Sequence
  Description of Artificial Sequence: Synthetic oligonucleotide
  Target: ANGPTL4; (+) strand; PAM type: YTN; PAM sequence: CTG
cccctccaacctggggaacg

SEQ ID NO: 18861 - DNA, 20 bp, Artificial Sequence
  Description of Artificial Sequence: Synthetic oligonucleotide
  Target: ANGPTL4; (+) strand; PAM type: YTN; PAM sequence: CTC
caacctggggaacgacagaa

SEQ ID NO: 18862 - DNA, 20 bp, Artificial Sequence
  Description of Artificial Sequence: Synthetic oligonucleotide
  Target: ANGPTL4; (+) strand; PAM type: YTN; PAM sequence: CTG
gggaacgacagaaaaaaaaa

SEQ ID NO: 18863 - DNA, 20 bp, Artificial Sequence
  Description of Artificial Sequence: Synthetic oligonucleotide
  Target: ANGPTL4; (+) strand; PAM type: YTN; PAM sequence: CTG
ggcacggtggcgcactccta

SEQ ID NO: 18864 - DNA, 20 bp, Artificial Sequence
  Description of Artificial Sequence: Synthetic oligonucleotide
  Target: ANGPTL4; (+) strand; PAM type: YTN; PAM sequence: CTC
ctacactccccgcactctgg

SEQ ID NO: 18865 - DNA, 20 bp, Artificial Sequence
  Description of Artificial Sequence: Synthetic oligonucleotide
  Target: ANGPTL4; (+) strand; PAM type: YTN; PAM sequence: CTA
cactccccgcactctgggag

SEQ ID NO: 18866 - DNA, 20 bp, Artificial Sequence
  Description of Artificial Sequence: Synthetic oligonucleotide
  Target: ANGPTL4; (+) strand; PAM type: YTN; PAM sequence: CTC
cccgcactctgggaggctga

SEQ ID NO: 18867 - DNA, 20 bp, Artificial Sequence
  Description of Artificial Sequence: Synthetic oligonucleotide
  Target: ANGPTL4; (+) strand; PAM type: YTN; PAM sequence: CTC
tgggaggctgaggtgggtag

SEQ ID NO: 18868 - DNA, 20 bp, Artificial Sequence
  Description of Artificial Sequence: Synthetic oligonucleotide
  Target: ANGPTL4; (+) strand; PAM type: YTN; PAM sequence: CTG
ggaggctgaggtgggtagat

SEQ ID NO: 18869 - DNA, 20 bp, Artificial Sequence
  Description of Artificial Sequence: Synthetic oligonucleotide
  Target: ANGPTL4; (+) strand; PAM type: YTN; PAM sequence: CTG
aggtgggtagatcacaaggt

SEQ ID NO: 18870 - DNA, 20 bp, Artificial Sequence
  Description of Artificial Sequence: Synthetic oligonucleotide
  Target: ANGPTL4; (+) strand; PAM type: YTN; PAM sequence: CTG
gctgacacggtgaaaccccg

SEQ ID NO: 18871 - DNA, 20 bp, Artificial Sequence
  Description of Artificial Sequence: Synthetic oligonucleotide
  Target: ANGPTL4; (+) strand; PAM type: YTN; PAM sequence: CTG
acacggtgaaaccccgtctc

SEQ ID NO: 18872 - DNA, 20 bp, Artificial Sequence
  Description of Artificial Sequence: Synthetic oligonucleotide
  Target: ANGPTL4; (+) strand; PAM type: YTN; PAM sequence: CTC
tactaaaaatacaaaaaatt

SEQ ID NO: 18873 - DNA, 20 bp, Artificial Sequence
  Description of Artificial Sequence: Synthetic oligonucleotide
  Target: ANGPTL4; (+) strand; PAM type: YTN; PAM sequence: CTA
ctaaaaatacaaaaaattag

SEQ ID NO: 18874 - DNA, 20 bp, Artificial Sequence
  Description of Artificial Sequence: Synthetic oligonucleotide
  Target: ANGPTL4; (+) strand; PAM type: YTN; PAM sequence: CTA
aaaatacaaaaaattagcca

SEQ ID NO: 18875 - DNA, 20 bp, Artificial Sequence
  Description of Artificial Sequence: Synthetic oligonucleotide
  Target: ANGPTL4; (+) strand; PAM type: YTN; PAM sequence: TTA
gccaggcatggtggcacatg

SEQ ID NO: 18876 - DNA, 20 bp, Artificial Sequence
  Description of Artificial Sequence: Synthetic oligonucleotide
  Target: ANGPTL4; (+) strand; PAM type: YTN; PAM sequence: CTA
ttcgggaggctaaggcagga

SEQ ID NO: 18877 - DNA, 20 bp, Artificial Sequence
  Description of Artificial Sequence: Synthetic oligonucleotide
  Target: ANGPTL4; (+) strand; PAM type: YTN; PAM sequence: TTC
gggaggctaaggcaggagaa

SEQ ID NO: 18878 - DNA, 20 bp, Artificial Sequence
  Description of Artificial Sequence: Synthetic oligonucleotide
  Target: ANGPTL4; (+) strand; PAM type: YTN; PAM sequence: CTA
aggcaggagaatcacttgaa

SEQ ID NO: 18879 - DNA, 20 bp, Artificial Sequence
  Description of Artificial Sequence: Synthetic oligonucleotide
  Target: ANGPTL4; (+) strand; PAM type: YTN; PAM sequence: CTT
gaacctgggaggcggaggtt

SEQ ID NO: 18880 - DNA, 20 bp, Artificial Sequence
  Description of Artificial Sequence: Synthetic oligonucleotide
  Target: ANGPTL4; (+) strand; PAM type: YTN; PAM sequence: TTG
aacctgggaggcggaggttg

SEQ ID NO: 18881 - DNA, 20 bp, Artificial Sequence
  Description of Artificial Sequence: Synthetic oligonucleotide
  Target: ANGPTL4; (+) strand; PAM type: YTN; PAM sequence: CTG
ggaggcggaggttgcagtga

SEQ ID NO: 18882 - DNA, 20 bp, Artificial Sequence
  Description of Artificial Sequence: Synthetic oligonucleotide
  Target: ANGPTL4; (+) strand; PAM type: YTN; PAM sequence: TTG
cagtgagctgagattgcacc

SEQ ID NO: 18883 - DNA, 20 bp, Artificial Sequence
  Description of Artificial Sequence: Synthetic oligonucleotide
  Target: ANGPTL4; (+) strand; PAM type: YTN; PAM sequence: CTG
agattgcaccactgcactcc

SEQ ID NO: 18884 - DNA, 20 bp, Artificial Sequence
  Description of Artificial Sequence: Synthetic oligonucleotide
  Target: ANGPTL4; (+) strand; PAM type: YTN; PAM sequence: TTG
caccactgcactccagcctg

SEQ ID NO: 18885 - DNA, 20 bp, Artificial Sequence
  Description of Artificial Sequence: Synthetic oligonucleotide
  Target: ANGPTL4; (+) strand; PAM type: YTN; PAM sequence: CTG
cactccagcctgggtgacag

SEQ ID NO: 18886 - DNA, 20 bp, Artificial Sequence
  Description of Artificial Sequence: Synthetic oligonucleotide
  Target: ANGPTL4; (+) strand; PAM type: YTN; PAM sequence: CTC
cagcctgggtgacagagcaa

SEQ ID NO: 18887 - DNA, 20 bp, Artificial Sequence
  Description of Artificial Sequence: Synthetic oligonucleotide
  Target: ANGPTL4; (+) strand; PAM type: YTN; PAM sequence: CTG
ggtgacagagcaagactctg

SEQ ID NO: 18888 - DNA, 20 bp, Artificial Sequence
  Description of Artificial Sequence: Synthetic oligonucleotide
  Target: ANGPTL4; (+) strand; PAM type: YTN; PAM sequence: CTC
tgtctcaaaaaagaaagaaa

SEQ ID NO: 18889 - DNA, 20 bp, Artificial Sequence
  Description of Artificial Sequence: Synthetic oligonucleotide
  Target: ANGPTL4; (+) strand; PAM type: YTN; PAM sequence: CTG
tctcaaaaaagaaagaaaaa

SEQ ID NO: 18890 - DNA, 20 bp, Artificial Sequence
  Description of Artificial Sequence: Synthetic oligonucleotide
  Target: ANGPTL4; (+) strand; PAM type: YTN; PAM sequence: CTC
aaaaaagaaagaaaaaaaga

SEQ ID NO: 18891 - DNA, 20 bp, Artificial Sequence
  Description of Artificial Sequence: Synthetic oligonucleotide
  Target: ANGPTL4; (+) strand; PAM type: YTN; PAM sequence: CTA
acaaggggccaggaagctgg

SEQ ID NO: 18892 - DNA, 20 bp, Artificial Sequence
  Description of Artificial Sequence: Synthetic oligonucleotide
  Target: ANGPTL4; (+) strand; PAM type: YTN; PAM sequence: CTG
ggatgtgaacctggacctgt

SEQ ID NO: 18893 - DNA, 20 bp, Artificial Sequence
  Description of Artificial Sequence: Synthetic oligonucleotide
  Target: ANGPTL4; (+) strand; PAM type: YTN; PAM sequence: CTG
gacctgttaaactccagagc

SEQ ID NO: 18894 - DNA, 20 bp, Artificial Sequence
  Description of Artificial Sequence: Synthetic oligonucleotide
  Target: ANGPTL4; (+) strand; PAM type: YTN; PAM sequence: CTG
ttaaactccagagctgcagc

SEQ ID NO: 18895 - DNA, 20 bp, Artificial Sequence
  Description of Artificial Sequence: Synthetic oligonucleotide
  Target: ANGPTL4; (+) strand; PAM type: YTN; PAM sequence: TTA
aactccagagctgcagctgt

SEQ ID NO: 18896 - DNA, 20 bp, Artificial Sequence
  Description of Artificial Sequence: Synthetic oligonucleotide
  Target: ANGPTL4; (+) strand; PAM type: YTN; PAM sequence: CTC
cagagctgcagctgtaaatc

SEQ ID NO: 18897 - DNA, 20 bp, Artificial Sequence
  Description of Artificial Sequence: Synthetic oligonucleotide
  Target: ANGPTL4; (+) strand; PAM type: YTN; PAM sequence: CTG
cagctgtaaatcacatccct

SEQ ID NO: 18898 - DNA, 20 bp, Artificial Sequence
  Description of Artificial Sequence: Synthetic oligonucleotide
  Target: ANGPTL4; (+) strand; PAM type: YTN; PAM sequence: CTG
taaatcacatccctctcctg

SEQ ID NO: 18899 - DNA, 20 bp, Artificial Sequence
  Description of Artificial Sequence: Synthetic oligonucleotide
  Target: ANGPTL4; (+) strand; PAM type: YTN; PAM sequence: CTC
tcctggaccacaggagctca

SEQ ID NO: 18900 - DNA, 20 bp, Artificial Sequence
  Description of Artificial Sequence: Synthetic oligonucleotide
  Target: ANGPTL4; (+) strand; PAM type: YTN; PAM sequence: CTC
ctggaccacaggagctcact

SEQ ID NO: 18901 - DNA, 20 bp, Artificial Sequence
  Description of Artificial Sequence: Synthetic oligonucleotide
  Target: ANGPTL4; (+) strand; PAM type: YTN; PAM sequence: CTG
gaccacaggagctcactggc

SEQ ID NO: 18902 - DNA, 20 bp, Artificial Sequence
  Description of Artificial Sequence: Synthetic oligonucleotide
  Target: ANGPTL4; (+) strand; PAM type: YTN; PAM sequence: CTC
actggccccagttcctgcat

SEQ ID NO: 18903 - DNA, 20 bp, Artificial Sequence
  Description of Artificial Sequence: Synthetic oligonucleotide
  Target: ANGPTL4; (+) strand; PAM type: YTN; PAM sequence: CTG
gccccagttcctgcatttgg

SEQ ID NO: 18904 - DNA, 20 bp, Artificial Sequence
  Description of Artificial Sequence: Synthetic oligonucleotide
  Target: ANGPTL4; (+) strand; PAM type: YTN; PAM sequence: TTC
ctgcatttggaaaatgggga

SEQ ID NO: 18905 - DNA, 20 bp, Artificial Sequence
  Description of Artificial Sequence: Synthetic oligonucleotide
  Target: ANGPTL4; (+) strand; PAM type: YTN; PAM sequence: CTG
catttggaaaatggggatgg

SEQ ID NO: 18906 - DNA, 20 bp, Artificial Sequence
  Description of Artificial Sequence: Synthetic oligonucleotide
  Target: ANGPTL4; (+) strand; PAM type: YTN; PAM sequence: TTT
ggaaaatggggatggttttg

SEQ ID NO: 18907 - DNA, 20 bp, Artificial Sequence
  Description of Artificial Sequence: Synthetic oligonucleotide
  Target: ANGPTL4; (+) strand; PAM type: YTN; PAM sequence: TTG
gaaaatggggatggttttga

SEQ ID NO: 18908 - DNA, 20 bp, Artificial Sequence
  Description of Artificial Sequence: Synthetic oligonucleotide
  Target: ANGPTL4; (+) strand; PAM type: YTN; PAM sequence: TTT
tgacaccccacccctccatg

SEQ ID NO: 18909 - DNA, 20 bp, Artificial Sequence
  Description of Artificial Sequence: Synthetic oligonucleotide
  Target: ANGPTL4; (+) strand; PAM type: YTN; PAM sequence: TTT
gacaccccacccctccatgc

SEQ ID NO: 18910 - DNA, 20 bp, Artificial Sequence
  Description of Artificial Sequence: Synthetic oligonucleotide
  Target: ANGPTL4; (+) strand; PAM type: YTN; PAM sequence: TTG
acaccccacccctccatgcc

SEQ ID NO: 18911 - DNA, 20 bp, Artificial Sequence
  Description of Artificial Sequence: Synthetic oligonucleotide
  Target: ANGPTL4; (+) strand; PAM type: YTN; PAM sequence: CTC
catgccaccatcccttcctg

SEQ ID NO: 18912 - DNA, 20 bp, Artificial Sequence
  Description of Artificial Sequence: Synthetic oligonucleotide
  Target: ANGPTL4; (+) strand; PAM type: YTN; PAM sequence: CTT
cctggcctcatggtgtgggg

SEQ ID NO: 18913 - DNA, 20 bp, Artificial Sequence
  Description of Artificial Sequence: Synthetic oligonucleotide
  Target: ANGPTL4; (+) strand; PAM type: YTN; PAM sequence: TTC
ctggcctcatggtgtgggga

SEQ ID NO: 18914 - DNA, 20 bp, Artificial Sequence
  Description of Artificial Sequence: Synthetic oligonucleotide
  Target: ANGPTL4; (+) strand; PAM type: YTN; PAM sequence: CTG
gcctcatggtgtggggaggg

SEQ ID NO: 18915 - DNA, 20 bp, Artificial Sequence
  Description of Artificial Sequence: Synthetic oligonucleotide
  Target: ANGPTL4; (+) strand; PAM type: YTN; PAM sequence: CTC
atggtgtggggagggggtgg

SEQ ID NO: 18916 - DNA, 20 bp, Artificial Sequence
  Description of Artificial Sequence: Synthetic oligonucleotide
  Target: ANGPTL4; (+) strand; PAM type: YTN; PAM sequence: TTA
ataaggcattaatattcatc

SEQ ID NO: 18917 - DNA, 20 bp, Artificial Sequence
  Description of Artificial Sequence: Synthetic oligonucleotide
  Target: ANGPTL4; (+) strand; PAM type: YTN; PAM sequence: TTA
atattcatcacaggctgggt

SEQ ID NO: 18918 - DNA, 20 bp, Artificial Sequence
  Description of Artificial Sequence: Synthetic oligonucleotide
  Target: ANGPTL4; (+) strand; PAM type: YTN; PAM sequence: TTC
atcacaggctgggtccagtg

SEQ ID NO: 18919 - DNA, 20 bp, Artificial Sequence
  Description of Artificial Sequence: Synthetic oligonucleotide
  Target: ANGPTL4; (+) strand; PAM type: YTN; PAM sequence: CTG
ggtccagtgcctcgcgactg

SEQ ID NO: 18920 - DNA, 20 bp, Artificial Sequence
  Description of Artificial Sequence: Synthetic oligonucleotide
  Target: ANGPTL4; (+) strand; PAM type: YTN; PAM sequence: CTC
gcgactgtaatcccagctct

SEQ ID NO: 18921 - DNA, 20 bp, Artificial Sequence
  Description of Artificial Sequence: Synthetic oligonucleotide
  Target: ANGPTL4; (+) strand; PAM type: YTN; PAM sequence: CTG
taatcccagctctttgggag

SEQ ID NO: 18922 - DNA, 20 bp, Artificial Sequence
  Description of Artificial Sequence: Synthetic oligonucleotide
  Target: ANGPTL4; (+) strand; PAM type: YTN; PAM sequence: CTC
tttgggaggctgaggctgga

SEQ ID NO: 18923 - DNA, 20 bp, Artificial Sequence
  Description of Artificial Sequence: Synthetic oligonucleotide
  Target: ANGPTL4; (+) strand; PAM type: YTN; PAM sequence: CTT
tgggaggctgaggctggagg

SEQ ID NO: 18924 - DNA, 20 bp, Artificial Sequence
  Description of Artificial Sequence: Synthetic oligonucleotide
  Target: ANGPTL4; (+) strand; PAM type: YTN; PAM sequence: TTT
gggaggctgaggctggagga

SEQ ID NO: 18925 - DNA, 20 bp, Artificial Sequence
  Description of Artificial Sequence: Synthetic oligonucleotide
  Target: ANGPTL4; (+) strand; PAM type: YTN; PAM sequence: TTG
ggaggctgaggctggaggac

SEQ ID NO: 18926 - DNA, 20 bp, Artificial Sequence
  Description of Artificial Sequence: Synthetic oligonucleotide
  Target: ANGPTL4; (+) strand; PAM type: YTN; PAM sequence: CTG
aggctggaggaccttggagt

SEQ ID NO: 18927 - DNA, 20 bp, Artificial Sequence
  Description of Artificial Sequence: Synthetic oligonucleotide
  Target: ANGPTL4; (+) strand; PAM type: YTN; PAM sequence: CTG
gaggaccttggagtttgaga

SEQ ID NO: 18928 - DNA, 20 bp, Artificial Sequence
  Description of Artificial Sequence: Synthetic oligonucleotide
  Target: ANGPTL4; (+) strand; PAM type: YTN; PAM sequence: CTT
ggagtttgagaccagcctac

SEQ ID NO: 18929 - DNA, 20 bp, Artificial Sequence
  Description of Artificial Sequence: Synthetic oligonucleotide
  Target: ANGPTL4; (+) strand; PAM type: YTN; PAM sequence: TTG
gagtttgagaccagcctacg

SEQ ID NO: 18930 - DNA, 20 bp, Artificial Sequence
  Description of Artificial Sequence: Synthetic oligonucleotide
  Target: ANGPTL4; (+) strand; PAM type: YTN; PAM sequence: TTT
gagaccagcctacgcaacac

SEQ ID NO: 18931 - DNA, 20 bp, Artificial Sequence
  Description of Artificial Sequence: Synthetic oligonucleotide
  Target: ANGPTL4; (+) strand; PAM type: YTN; PAM sequence: TTG
agaccagcctacgcaacaca

SEQ ID NO: 18932 - DNA, 20 bp, Artificial Sequence
  Description of Artificial Sequence: Synthetic oligonucleotide
  Target: ANGPTL4; (+) strand; PAM type: YTN; PAM sequence: CTA
cgcaacacagcaagacctca

SEQ ID NO: 18933 - DNA, 20 bp, Artificial Sequence
  Description of Artificial Sequence: Synthetic oligonucleotide
  Target: ANGPTL4; (+) strand; PAM type: YTN; PAM sequence: CTC
atctctacgataaattttta

SEQ ID NO: 18934 - DNA, 20 bp, Artificial Sequence
  Description of Artificial Sequence: Synthetic oligonucleotide
  Target: ANGPTL4; (+) strand; PAM type: YTN; PAM sequence: CTC
tacgataaatttttaaaaag

SEQ ID NO: 18935 - DNA, 20 bp, Artificial Sequence
  Description of Artificial Sequence: Synthetic oligonucleotide
  Target: ANGPTL4; (+) strand; PAM type: YTN; PAM sequence: CTA
cgataaatttttaaaaagtc

SEQ ID NO: 18936 - DNA, 20 bp, Artificial Sequence
  Description of Artificial Sequence: Synthetic oligonucleotide
  Target: ANGPTL4; (+) strand; PAM type: YTN; PAM sequence: TTT
ttaaaaagtccgggtgcagt

SEQ ID NO: 18937 - DNA, 20 bp, Artificial Sequence
  Description of Artificial Sequence: Synthetic oligonucleotide
  Target: ANGPTL4; (+) strand; PAM type: YTN; PAM sequence: TTT
taaaaagtccgggtgcagtg

SEQ ID NO: 18938 - DNA, 20 bp, Artificial Sequence
  Description of Artificial Sequence: Synthetic oligonucleotide
  Target: ANGPTL4; (+) strand; PAM type: YTN; PAM sequence: TTT
aaaaagtccgggtgcagtgg

SEQ ID NO: 18939 - DNA, 20 bp, Artificial Sequence
  Description of Artificial Sequence: Synthetic oligonucleotide
  Target: ANGPTL4; (+) strand; PAM type: YTN; PAM sequence: TTA
aaaagtccgggtgcagtggc

SEQ ID NO: 18940 - DNA, 20 bp, Artificial Sequence
  Description of Artificial Sequence: Synthetic oligonucleotide
  Target: ANGPTL4; (+) strand; PAM type: YTN; PAM sequence: CTC
atgcctataatcccagcact

SEQ ID NO: 18941 - DNA, 20 bp, Artificial Sequence
  Description of Artificial Sequence: Synthetic oligonucleotide
  Target: ANGPTL4; (+) strand; PAM type: YTN; PAM sequence: CTA
taatcccagcactttgggag

SEQ ID NO: 18942 - DNA, 20 bp, Artificial Sequence
  Description of Artificial Sequence: Synthetic oligonucleotide
  Target: ANGPTL4; (+) strand; PAM type: YTN; PAM sequence: CTT
tgggaggccaaggcgggtgg

SEQ ID NO: 18943 - DNA, 20 bp, Artificial Sequence
  Description of Artificial Sequence: Synthetic oligonucleotide
  Target: ANGPTL4; (+) strand; PAM type: YTN; PAM sequence: TTT
gggaggccaaggcgggtgga

SEQ ID NO: 18944 - DNA, 20 bp, Artificial Sequence
  Description of Artificial Sequence: Synthetic oligonucleotide
  Target: ANGPTL4; (+) strand; PAM type: YTN; PAM sequence: TTG
ggaggccaaggcgggtggat

SEQ ID NO: 18945 - DNA, 20 bp, Artificial Sequence
  Description of Artificial Sequence: Synthetic oligonucleotide
  Target: ANGPTL4; (+) strand; PAM type: YTN; PAM sequence: TTA
ggagttcaagaccagcctgg

SEQ ID NO: 18946 - DNA, 20 bp, Artificial Sequence
  Description of Artificial Sequence: Synthetic oligonucleotide
  Target: ANGPTL4; (+) strand; PAM type: YTN; PAM sequence: TTC
aagaccagcctggccaagat

SEQ ID NO: 18947 - DNA, 20 bp, Artificial Sequence
  Description of Artificial Sequence: Synthetic oligonucleotide
  Target: ANGPTL4; (+) strand; PAM type: YTN; PAM sequence: CTG
gccaagatagtgaaacccca

SEQ ID NO: 18948 - DNA, 20 bp, Artificial Sequence
  Description of Artificial Sequence: Synthetic oligonucleotide
  Target: ANGPTL4; (+) strand; PAM type: YTN; PAM sequence: CTC
tactaaaaatacaaaaaaat

SEQ ID NO: 18949 - DNA, 20 bp, Artificial Sequence
  Description of Artificial Sequence: Synthetic oligonucleotide
  Target: ANGPTL4; (+) strand; PAM type: YTN; PAM sequence: CTA
ctaaaaatacaaaaaaatta

SEQ ID NO: 18950 - DNA, 20 bp, Artificial Sequence
  Description of Artificial Sequence: Synthetic oligonucleotide
  Target: ANGPTL4; (+) strand; PAM type: YTN; PAM sequence: CTA
aaaatacaaaaaaattagcc

SEQ ID NO: 18951 - DNA, 20 bp, Artificial Sequence
  Description of Artificial Sequence: Synthetic oligonucleotide
  Target: ANGPTL4; (+) strand; PAM type: YTN; PAM sequence: TTA
gccaggtgtggtggtgggcg

SEQ ID NO: 18952 - DNA, 20 bp, Artificial Sequence
  Description of Artificial Sequence: Synthetic oligonucleotide
  Target: ANGPTL4; (+) strand; PAM type: YTN; PAM sequence: CTG
taatcccagctacttgagag

SEQ ID NO: 18953 - DNA, 20 bp, Artificial Sequence
  Description of Artificial Sequence: Synthetic oligonucleotide
  Target: ANGPTL4; (+) strand; PAM type: YTN; PAM sequence: CTA
cttgagaggctaaggcagag

SEQ ID NO: 18954 - DNA, 20 bp, Artificial Sequence
  Description of Artificial Sequence: Synthetic oligonucleotide
  Target: ANGPTL4; (+) strand; PAM type: YTN; PAM sequence: CTT
gagaggctaaggcagagaat

SEQ ID NO: 18955 - DNA, 20 bp, Artificial Sequence
  Description of Artificial Sequence: Synthetic oligonucleotide
  Target: ANGPTL4; (+) strand; PAM type: YTN; PAM sequence: TTG
agaggctaaggcagagaatt

SEQ ID NO: 18956 - DNA, 20 bp, Artificial Sequence
  Description of Artificial Sequence: Synthetic oligonucleotide
  Target: ANGPTL4; (+) strand; PAM type: YTN; PAM sequence: CTA
aggcagagaattgcttggac

SEQ ID NO: 18957 - DNA, 20 bp, Artificial Sequence
  Description of Artificial Sequence: Synthetic oligonucleotide
  Target: ANGPTL4; (+) strand; PAM type: YTN; PAM sequence: TTG
cttggactcgggaggcagag

SEQ ID NO: 18958 - DNA, 20 bp, Artificial Sequence
  Description of Artificial Sequence: Synthetic oligonucleotide
  Target: ANGPTL4; (+) strand; PAM type: YTN; PAM sequence: CTT
ggactcgggaggcagagggt

SEQ ID NO: 18959 - DNA, 20 bp, Artificial Sequence
  Description of Artificial Sequence: Synthetic oligonucleotide
  Target: ANGPTL4; (+) strand; PAM type: YTN; PAM sequence: TTG
gactcgggaggcagagggtg

SEQ ID NO: 18960 - DNA, 20 bp, Artificial Sequence
  Description of Artificial Sequence: Synthetic oligonucleotide
  Target: ANGPTL4; (+) strand; PAM type: YTN; PAM sequence: CTC
gggaggcagagggtgcagtg

SEQ ID NO: 18961 - DNA, 20 bp, Artificial Sequence
  Description of Artificial Sequence: Synthetic oligonucleotide
  Target: ANGPTL4; (+) strand; PAM type: YTN; PAM sequence: CTG
cactccagcctgggcaacag

SEQ ID NO: 18962 - DNA, 20 bp, Artificial Sequence
  Description of Artificial Sequence: Synthetic oligonucleotide
  Target: ANGPTL4; (+) strand; PAM type: YTN; PAM sequence: CTC
cagcctgggcaacagagtga

SEQ ID NO: 18963 - DNA, 20 bp, Artificial Sequence
  Description of Artificial Sequence: Synthetic oligonucleotide
  Target: ANGPTL4; (+) strand; PAM type: YTN; PAM sequence: CTG
ggcaacagagtgagaccctg

SEQ ID NO: 18964 - DNA, 20 bp, Artificial Sequence
  Description of Artificial Sequence: Synthetic oligonucleotide
  Target: ANGPTL4; (+) strand; PAM type: YTN; PAM sequence: CTG
cctcaaaaaaaaaaaaaaag

SEQ ID NO: 18965 - DNA, 20 bp, Artificial Sequence
  Description of Artificial Sequence: Synthetic oligonucleotide
  Target: ANGPTL4; (+) strand; PAM type: YTN; PAM sequence: CTC
aaaaaaaaaaaaaaagaatc

SEQ ID NO: 18966 - DNA, 20 bp, Artificial Sequence
  Description of Artificial Sequence: Synthetic oligonucleotide
  Target: ANGPTL4; (+) strand; PAM type: YTN; PAM sequence: TTT
cagagggaggagagacagaa

SEQ ID NO: 18967 - DNA, 20 bp, Artificial Sequence
  Description of Artificial Sequence: Synthetic oligonucleotide
  Target: ANGPTL4; (+) strand; PAM type: YTN; PAM sequence: TTC
agagggaggagagacagaat

SEQ ID NO: 18968 - DNA, 20 bp, Artificial Sequence
  Description of Artificial Sequence: Synthetic oligonucleotide
  Target: ANGPTL4; (+) strand; PAM type: YTN; PAM sequence: CTG
aggatgatagagggagggag

SEQ ID NO: 18969 - DNA, 20 bp, Artificial Sequence
  Description of Artificial Sequence: Synthetic oligonucleotide
  Target: ANGPTL4; (+) strand; PAM type: YTN; PAM sequence: CTC
tgggtttgatgggagggagg

SEQ ID NO: 18970 - DNA, 20 bp, Artificial Sequence
  Description of Artificial Sequence: Synthetic oligonucleotide
  Target: ANGPTL4; (+) strand; PAM type: YTN; PAM sequence: CTG
ggtttgatgggagggaggga

SEQ ID NO: 18971 - DNA, 20 bp, Artificial Sequence
  Description of Artificial Sequence: Synthetic oligonucleotide
  Target: ANGPTL4; (+) strand; PAM type: YTN; PAM sequence: TTT
gatgggagggagggaaggaa

SEQ ID NO: 18972 - DNA, 20 bp, Artificial Sequence
  Description of Artificial Sequence: Synthetic oligonucleotide
  Target: ANGPTL4; (+) strand; PAM type: YTN; PAM sequence: TTG
atgggagggagggaaggaag

SEQ ID NO: 18973 - DNA, 20 bp, Artificial Sequence
  Description of Artificial Sequence: Synthetic oligonucleotide
  Target: ANGPTL4; (+) strand; PAM type: YTN; PAM sequence: TTT
gtttatgggattgagaggtg

SEQ ID NO: 18974 - DNA, 20 bp, Artificial Sequence
  Description of Artificial Sequence: Synthetic oligonucleotide
  Target: ANGPTL4; (+) strand; PAM type: YTN; PAM sequence: TTG
tttatgggattgagaggtga

SEQ ID NO: 18975 - DNA, 20 bp, Artificial Sequence
  Description of Artificial Sequence: Synthetic oligonucleotide
  Target: ANGPTL4; (+) strand; PAM type: YTN; PAM sequence: TTT
atgggattgagaggtgaagc

SEQ ID NO: 18976 - DNA, 20 bp, Artificial Sequence
  Description of Artificial Sequence: Synthetic oligonucleotide
  Target: ANGPTL4; (+) strand; PAM type: YTN; PAM sequence: TTA
tgggattgagaggtgaagcc

SEQ ID NO: 18977 - DNA, 20 bp, Artificial Sequence
  Description of Artificial Sequence: Synthetic oligonucleotide
  Target: ANGPTL4; (+) strand; PAM type: YTN; PAM sequence: TTG
agaggtgaagccggctaggc

SEQ ID NO: 18978 - DNA, 20 bp, Artificial Sequence
  Description of Artificial Sequence: Synthetic oligonucleotide
  Target: ANGPTL4; (+) strand; PAM type: YTN; PAM sequence: CTA
ggcttctgggtcgggtgggg

SEQ ID NO: 18979 - DNA, 20 bp, Artificial Sequence
  Description of Artificial Sequence: Synthetic oligonucleotide
  Target: ANGPTL4; (+) strand; PAM type: YTN; PAM sequence: CTT
ctgggtcgggtggggacttg

SEQ ID NO: 18980 - DNA, 20 bp, Artificial Sequence
  Description of Artificial Sequence: Synthetic oligonucleotide
  Target: ANGPTL4; (+) strand; PAM type: YTN; PAM sequence: TTC
tgggtcgggtggggacttga

SEQ ID NO: 18981 - DNA, 20 bp, Artificial Sequence
  Description of Artificial Sequence: Synthetic oligonucleotide
  Target: ANGPTL4; (+) strand; PAM type: YTN; PAM sequence: CTG
ggtcgggtggggacttgaac

SEQ ID NO: 18982 - DNA, 20 bp, Artificial Sequence
  Description of Artificial Sequence: Synthetic oligonucleotide
  Target: ANGPTL4; (+) strand; PAM type: YTN; PAM sequence: CTT
gaacttttctgtctagctaa

SEQ ID NO: 18983 - DNA, 20 bp, Artificial Sequence
  Description of Artificial Sequence: Synthetic oligonucleotide
  Target: ANGPTL4; (+) strand; PAM type: YTN; PAM sequence: TTG
aacttttctgtctagctaaa

SEQ ID NO: 18984 - DNA, 20 bp, Artificial Sequence
  Description of Artificial Sequence: Synthetic oligonucleotide
  Target: ANGPTL4; (+) strand; PAM type: YTN; PAM sequence: CTT
ttctgtctagctaaaggatt

SEQ ID NO: 18985 - DNA, 20 bp, Artificial Sequence
  Description of Artificial Sequence: Synthetic oligonucleotide
  Target: ANGPTL4; (+) strand; PAM type: YTN; PAM sequence: TTT
tctgtctagctaaaggattg

SEQ ID NO: 18986 - DNA, 20 bp, Artificial Sequence
  Description of Artificial Sequence: Synthetic oligonucleotide
  Target: ANGPTL4; (+) strand; PAM type: YTN; PAM sequence: TTT
ctgtctagctaaaggattgt

SEQ ID NO: 18987 - DNA, 20 bp, Artificial Sequence
  Description of Artificial Sequence: Synthetic oligonucleotide
  Target: ANGPTL4; (+) strand; PAM type: YTN; PAM sequence: TTC
tgtctagctaaaggattgta

SEQ ID NO: 18988 - DNA, 20 bp, Artificial Sequence
  Description of Artificial Sequence: Synthetic oligonucleotide
  Target: ANGPTL4; (+) strand; PAM type: YTN; PAM sequence: CTG
tctagctaaaggattgtaaa

SEQ ID NO: 18989 - DNA, 20 bp, Artificial Sequence
  Description of Artificial Sequence: Synthetic oligonucleotide
  Target: ANGPTL4; (+) strand; PAM type: YTN; PAM sequence: CTA
gctaaaggattgtaaacgta

SEQ ID NO: 18990 - DNA, 20 bp, Artificial Sequence
  Description of Artificial Sequence: Synthetic oligonucleotide
  Target: ANGPTL4; (+) strand; PAM type: YTN; PAM sequence: CTA
aaggattgtaaacgtaccaa

SEQ ID NO: 18991 - DNA, 20 bp, Artificial Sequence
  Description of Artificial Sequence: Synthetic oligonucleotide
  Target: ANGPTL4; (+) strand; PAM type: YTN; PAM sequence: TTG
taaacgtaccaatcagcact

SEQ ID NO: 18992 - DNA, 20 bp, Artificial Sequence
  Description of Artificial Sequence: Synthetic oligonucleotide
  Target: ANGPTL4; (+) strand; PAM type: YTN; PAM sequence: CTC
tgtgtctagctaaaggattg

SEQ ID NO: 18993 - DNA, 20 bp, Artificial Sequence
  Description of Artificial Sequence: Synthetic oligonucleotide
  Target: ANGPTL4; (+) strand; PAM type: YTN; PAM sequence: CTG
tgtctagctaaaggattgta

SEQ ID NO: 18994 - DNA, 20 bp, Artificial Sequence
  Description of Artificial Sequence: Synthetic oligonucleotide
  Target: ANGPTL4; (+) strand; PAM type: YTN; PAM sequence: CTA
gctaaaggattgtaaatgca

SEQ ID NO: 18995 - DNA, 20 bp, Artificial Sequence
  Description of Artificial Sequence: Synthetic oligonucleotide
  Target: ANGPTL4; (+) strand; PAM type: YTN; PAM sequence: CTA
aaggattgtaaatgcaccaa

SEQ ID NO: 18996 - DNA, 20 bp, Artificial Sequence
  Description of Artificial Sequence: Synthetic oligonucleotide
  Target: ANGPTL4; (+) strand; PAM type: YTN; PAM sequence: TTG
taaatgcaccaatcagcact

SEQ ID NO: 18997 - DNA, 20 bp, Artificial Sequence
  Description of Artificial Sequence: Synthetic oligonucleotide
  Target: ANGPTL4; (+) strand; PAM type: YTN; PAM sequence: CTC
tgtgtctagctaaaggtttg

SEQ ID NO: 18998 - DNA, 20 bp, Artificial Sequence
  Description of Artificial Sequence: Synthetic oligonucleotide
  Target: ANGPTL4; (+) strand; PAM type: YTN; PAM sequence: CTG
tgtctagctaaaggtttgta

SEQ ID NO: 18999 - DNA, 20 bp, Artificial Sequence
  Description of Artificial Sequence: Synthetic oligonucleotide
  Target: ANGPTL4; (+) strand; PAM type: YTN; PAM sequence: CTA
gctaaaggtttgtaaatgca

SEQ ID NO: 19000 - DNA, 20 bp, Artificial Sequence
  Description of Artificial Sequence: Synthetic oligonucleotide
  Target: ANGPTL4; (+) strand; PAM type: YTN; PAM sequence: CTA
aaggtttgtaaatgcaccaa

SEQ ID NO: 19001 - DNA, 20 bp, Artificial Sequence
  Description of Artificial Sequence: Synthetic oligonucleotide
  Target: ANGPTL4; (+) strand; PAM type: YTN; PAM sequence: TTT
gtaaatgcaccaatcagcgc

SEQ ID NO: 19002 - DNA, 20 bp, Artificial Sequence
  Description of Artificial Sequence: Synthetic oligonucleotide
  Target: ANGPTL4; (+) strand; PAM type: YTN; PAM sequence: TTG
taaatgcaccaatcagcgct

SEQ ID NO: 19003 - DNA, 20 bp, Artificial Sequence
  Description of Artificial Sequence: Synthetic oligonucleotide
  Target: ANGPTL4; (+) strand; PAM type: YTN; PAM sequence: CTC
tgtgtctagctaatcaggta

SEQ ID NO: 19004 - DNA, 20 bp, Artificial Sequence
  Description of Artificial Sequence: Synthetic oligonucleotide
  Target: ANGPTL4; (+) strand; PAM type: YTN; PAM sequence: CTG
tgtctagctaatcaggtagg

SEQ ID NO: 19005 - DNA, 20 bp, Artificial Sequence
  Description of Artificial Sequence: Synthetic oligonucleotide
  Target: ANGPTL4; (+) strand; PAM type: YTN; PAM sequence: CTA
gctaatcaggtaggggactt

SEQ ID NO: 19006 - DNA, 20 bp, Artificial Sequence
  Description of Artificial Sequence: Synthetic oligonucleotide
  Target: ANGPTL4; (+) strand; PAM type: YTN; PAM sequence: CTA
atcaggtaggggacttggag

SEQ ID NO: 19007-19036 - skipped (30 entries)

SEQ ID NO: 19037 - DNA, 23 bp, Artificial Sequence
  Description of Artificial Sequence: Synthetic oligonucleotide
  modified_base (1)..(21): a, c, t, g, unknown or other
nnnnnnnnnnnnnnnnnnnnnrg

SEQ ID NO: 19038 - DNA, 100 bp, Artificial Sequence
  Description of Artificial Sequence: Synthetic oligonucleotide
  modified_base (1)..(20): a, c, t, g, unknown or other
nnnnnnnnnnnnnnnnnnnnguuuuagagcuagaaauagcaaguuaaaauaaggcuaguccguuaucaacuugaaaaaguggcaccgagucggugcuuuu

SEQ ID NO: 19039 - DNA, 96 bp, Artificial Sequence
  Description of Artificial Sequence: Synthetic oligonucleotide
  modified_base (1)..(20): a, c, t, g, unknown or other
nnnnnnnnnnnnnnnnnnnnguuuuagagcuagaaauagcaaguuaaaauaaggcuaguccguuaucaacuugaaaaaguggcaccgagucggugc

SEQ ID NO: 19040 - DNA, 78 bp, Artificial Sequence
  Description of Artificial Sequence: Synthetic oligonucleotide
  modified_base (1)..(1): a, c, t, g, unknown or other
nguuuuagagcuagaaauagcaaguuaaaauaaggcuaguccguuaucaacuugaaaaaguggcaccgagucggugcu

SEQ ID NO: 19041 - protein, 4 aa, Artificial Sequence
  Description of Artificial Sequence: Synthetic polypeptide
  misc_feature (1)..(3): Xaa is any purine
  misc_feature (4)..(4): Xaa is a nucleotide that can form a wobble pair with a nucleotide on the opposite strand
XXXX
